(19) United States
(12) Patent Application Publication
(10) Pub. No.: US 2024/0238409 A1
(43) Pub. Date: Jul. 18, 2024

(54) SARS-COV-2 MULTI-EPITOPE VACCINES

(71) Applicants: THE UNIVERSITY OF BRITISH COLUMBIA, Vancouver (CA); THE JAMES HUTTON INSTITUTE, Dundee (GB)

(72) Inventors: Wilfred JEFFERIES, Surrey (CA); Paolo RIBECA, Edinburgh, Midlothian (GB)

(21) Appl. No.: 18/558,241

(22) PCT Filed: May 5, 2022
(86) PCT No.: PCT/CA2022/050705

§ 371 Date: Oct. 31, 2023

Related U.S. Application Data
(60) Provisional application No. 63/184,547, filed on May 5, 2021.

(51) Int. Cl. A61K 39/215; A61K 39/00; C12N 7/00; C12N 15/86

(52) U.S. Cl. CPC A61K 39/215; C12N 7/00; C12N 15/86; A61K 2039/53; A61K 2039/545; A61K 2039/55555; C12N 2710/10041; C12N 2710/24043; C12N 2760/20241; C12N 2770/20034

(57) ABSTRACT

The present invention provides multi-epitope vaccines comprising or capable of expressing one or more concatemers of epitopes from a viral pathogen, namely, SARS-COV-2. wherein at least a portion of the epitopes are from conserved viral proteins and wherein the vaccine comprises or expresses epitopes for all MHC I and MHC II alleles with a frequency >1% in the target population.

### FIELD OF THE INVENTION

[0001] This invention pertains generally to vaccines and, more particularly multi-epitope vaccines for viral pathogens including SARS-COV-2, the causative agent of COVID-19.

### BACKGROUND OF THE INVENTION

[0002] An outbreak of pneumonia like disease termed COVID-19 caused by a novel coronavirus, SARS-COV-2, has spread across the world and become a global pandemic. First generation vaccines targeting SARS-COV-2 have been developed by BioNTech/Pfizer, Moderna, Oxford/Astra Zeneca and others. These first generation vaccines all target spike protein: the Oxford/Astra Zeneca vaccine uses an adenoviral vector; the vaccines by Moderna and Pfizer are RNA based; the vaccine by Imperial College London relies upon self-amplifying RNA.

[0003] The spike protein is a poor candidate choice for a vaccine. Spike is hypervariable and prone to mutations. A number of SARS-COV-2 variants have been identified, and most of the sequence variant characterising them are usually located within Spike. Moreover, a low number of antibodies from survivors (10-30%) target spike protein. In addition, vaccines targeting spike protein will not immunise all individuals due to HLA variability.

[0004] To work, a vaccine must contain pathogen-derived molecules (typically proteins or glycans) processed first by the host cell into peptides and then presented (antigen presentation) at the host cell surface on its Human Leukocyte Antigens (HLA). HLAs are encoded within the highly polymorphic major histocompatibility complex (MHC) on Chromosome 6. This process leads to presentation of peptides originating from self and pathogen. HLA-peptide complexes are then specifically recognized by T-cells via the T-cell receptor (TCR); while self-peptide ligands do not typically elicit a response from the immune system, an immunogenic foreign peptide ligand-HLA complex will bind a TCR and trigger an immune response that leads to the development of cytotoxic and memory T- and B-cells. There are many components in the host immune system, but HLA molecules are the chief determinants of antigen presentation to the T-cells for subsequent activation of the immune response.

[0005] The classical HLA genes are the most polymorphic genes in the human genome, with some having more than a thousand known alleles. Alleles are distributed unevenly around the world but typically clustered according to ethnicity. These genes are divided into two subgroups, mainly based on the source of the peptides they tend to present: HLA I genes are expressed on all cells except red blood cells, and present peptides of intracellular origin (e.g. from self or viruses), whereas HLA-II genes are expressed only on professional antigen presenting cells and present peptides that originate extracellularly (e.g. from bacteria). Thus, the response to a viral pathogen such as SARS-COV-2 is mediated by HLA-I.

[0006] The HLA genes are co-dominantly expressed and encode HLA proteins that are referred to as HLA Class I (HLA-A, -B, -C) and HLA Class II (HLA-D). They are critical in priming adaptive immune responses. CD4+T helper/inducer cells recognize viral peptides bound to HLA-II encoded proteins and CD8+ Cytotoxic T cells recognize viral peptides bound to HLA-A, -B, -C, encoded proteins. The vast polymorphism in their extracellular peptide binding domains leads to the diversity of peptide antigens that can be bound and subsequently recognized by T-cell receptors. HLA class I molecules generally present short (8-12 amino acids) intracellularly-derived peptides, such as viral antigens. HLA class II molecules are capable of presenting longer (i.e., generally more than 13 amino acids) extracellularly derived peptides, such as antigenic fragments generated from viral proteins. The HLA allele polymorphism renders each variant protein a distinct product with the main difference focused on the peptide-binding groove and the conformation of adjacent regions directly engaged with peptide binding and interaction with the TCR. A T-cell will recognize bound antigen as a complex with a restricted allelic variant of HLA molecule. Depending on the combinations of HLA-I and II alleles expressed, an individual may be differently equipped to resist certain viruses, including coronaviruses. Thus, individual genetic variation across HLA genes aids in understanding how variation in HLA may affect the course of COVID-19, and could help identify individuals at higher risk of succumbing to the disease.

[0007] Previous research on related virus strains (SARS-COV-1 and MERS-Cov) demonstrated that viral antigen presentation of SARS-COV-1 mainly depends on HLA-I and HLA-II molecules. Numerous HLA-I polymorphisms correlate to susceptibility of SARS-COV-1, such as HLA-B*46:01 5, HLA-B*07:03, HLA-DR B1*12:02, and HLA-Cw*08:01, whereas the HLA-DR*03:01, HLA-Cw15:02 and HLA-A*02:01 alleles are related to the protection from SARS-COV-1 infection HLA-II molecules, such as HLA-DRB1*11:01 and HLA-DQB1*02, are associated with the susceptibility to MERS-COV infection. These data suggest that individual HLA genotypes may differentially control susceptibility or protection in T-cell mediated anti-SARS-COV-2 responses. Thus, HLA polymorphism could potentially alter disease outcomes and SARS-COV-2 transmission. The enormous diversity in HLA genes means that some individuals can present an antigen and mount a strong immune response against it, while others cannot present it at all. This is especially relevant for vaccination strategies involving subunit vaccines, since the number of available antigens can be very small. In fact, HLA polymorphism is a likely basis for the observed variations in vaccine efficacy.

[0008] Epitope-based or string of beads vaccines use concatemers of short immunogenic peptide sequences derived from antigens that are recognised by either CD4 or CD8 T-cells in the context of HLA-II or HLA-I respectively. They have several advantages over whole attenuated or subunit vaccines because they do not contain potentially infectious material. Furthermore, peptides can be chosen to take the genetic variation of pathogens and HLA-binding specificities into account. Development of such vaccines requires bioinformatics for prediction of HLA epitopes. Machine-learning methods, such as probabilistic models, neural networks, and support vectors machines, are routinely used with high accuracy for epitope prediction. Different algorithms have been used to create string of bead vaccines that generally concentrate on binding peptides for a small number of HLA-I epitopes.

[0009] A variety of platforms, including but not limited to nucleic acid, viral vectors, attenuated viruses and recombinant protein, are being examined for the development of the SARS-COV-2 vaccine. The use of nucleic acid-based vaccines allow for vaccines to be obtained in a short timeframe. Furthermore, nucleic acid-based vaccine manufacturing is safe and time-saving, and bypasses the need to grow highly pathogenic organisms at a large scale, resulting in a lower risk of contamination with live infectious reagents and release of dangerous pathogens.

[0010] The SAM vaccine platform is composed of one or more non-viral, typically virus-derived, engineered replicons that drive high levels of expression of encoding antigens. Very low doses are required (mgs) as tens of thousands of copies are made by transfected cells. They may be delivered via intramuscular (i.m.), in the same manner as earlier mRNA vaccines, and can be encapsulated within a lipid nanoparticle to further boost performance. This manufacturing process makes GMP grade SAM a promising vaccine approach for filling the gap between emerging infectious disease and the desperate need for effective COVID-19 vaccines. SAMs are an innovative platform for vaccine development. Within an alphavirus backbone, the mRNA replicates through a double stranded RNA intermediate, and the antigen of interest replaces structural proteins, so no infectious virus is made. Very low doses are required (ugs) as tens of thousands of copies are made by transfected cells. They are delivered via intramuscular (i.m.), in the same manner as earlier mRNA vaccines, and may be delivered as naked RNA or encapsulated within a lipid nanoparticle. Comparatively, mRNA vaccines confer several advantages over vaccines introduced by virus vectors and DNA vaccines: the production procedure to generate mRNA vaccines is cell-free, simple and rapid if compared to production of whole microbe, or live attenuated or subunit vaccines.

[0011] This background information is provided for the purpose of making known information believed by the applicant to be of possible relevance to the present invention. No admission is necessarily intended, nor should be construed, that any of the preceding information constitutes prior art against the present invention.

### SUMMARY OF THE INVENTION

[0012] An object of the present invention is to provide a vaccine for viral pathogens conferring universal protection irrespective of viral mutations.

[0013] In accordance with an aspect of the present invention, there is provided a vaccine comprising or capable of expressing one or more concatemers of epitopes from a viral pathogen. In certain embodiments, the vaccine comprises or expresses epitopes for all MHC I and MHC II alleles with a frequency >1% in the target population. In certain embodiments, the target population is geographically restricted. In certain embodiments, the epitopes that bind MHC I or MHC II alleles associated with autoimmune disease are excluded. In certain embodiments, at least a portion of said epitopes are from conserved proteins from said viral pathogen. In certain embodiments, the epitopes are universal (common) epitopes of said viral pathogen. In certain embodiments, the epitopes are variant specific epitopes.

[0014] In certain embodiments, the viral pathogen is a sarbecovirus, including but not limited to SARS-CoV-2. In specific embodiments, the vaccine comprises or is capable of expressing expressing one or more concatemers of epitopes from one or more strains of sarbecovirus (e.g. SARS-CoV-2). Each concatemer of epitopes may include epitopes from a single strain or from multiple strains. For vaccines capable of expressing expressing one or more concatemers of epitopes from one or more strains, the one or more concatemers may be expressed by one or more expression vectors. In certain embodiments, each concatemer is expressed by a separate expression vector. In certain embodiments, one or more concatemers are expressed by a single expression vector.

[0015] In certain embodiments, a linker separates each of said epitopes. Exemplary linkers include RY, KRY, RYP, PRRARSV, PRRARSVKRY, PRRARSVRYP, ATLQA, QEAGAG and LALAA. The linkers may be the same or different between epitopes in a concatemer.

[0016] In certain embodiments, at least one of the one or more epitopes is as set forth in any one of the tables set forth below and/or as set forth in SEQ ID NOs 1-789.

[0017] In accordance with an aspect of the present invention, there is provided a vaccine comprising or capable of expressing one or more concatemers of epitopes set forth in any one of the tables set forth below and/or as set forth in SEQ ID NOs 1-789.

[0018] In accordance with an aspect of the present invention, there is provided a vaccine comprising or capable of expressing one or more concatemers set forth in SEQ ID NOs 798-851.

[0019] In certain embodiments, the vaccine is a viral vector-based vaccine, including but not limited to an adenoviral vector, a vesicular stomatitis virus vector or a vaccinia vector.

[0020] In certain embodiments, the vaccine is a nucleic acid-based vaccine.

[0021] In certain embodiments, the vaccine is a SAM RNA-based vaccine. In more specific embodiments, the SAM RNA-based vaccine is encapsulated in a lipid nanoparticle (LNP). In more specific embodiments, the LNP comprises a cationic lipid. In more specific embodiments, the LNP comprises phosphatidylcholine/cholesterol/PEG-lipid, C12-200, dimethyldioctadecylammonium (DDA), 1,2-dioleoyl-3-trimethylammonium propane (DOTAP) or 1,2-dilinoleyloxy-3-dimethylaminopropane (DLinDMA). In certain embodiments, the LNP comprises GEN-7036 (Lipid composition (ratio)=DOTAP:Chol:DOPE (1:0.75:0.5)).

[0022] In certain embodiments, the vaccine further comprises an adjuvant.

[0023] In certain embodiments, the vaccine further comprises a buffer.

[0024] In specific embodiments, the vaccine is a SAM RNA-based vaccine and comprises one or more SAM RNA vectors of the invention, cholesterol, 1,2-distearoyl-sn-glycero-3-phosphocholine (DSPC), ((4-hydroxybutyl)azanediyl)bis(hexane-6,1-diyl)bis(2-hexyldecanoate) (ALC-3015), 2-[(polyethylene glycol)-2000]-N,N-ditetradecylacetamide (ALC-0159), potassium chloride, monobasic potassium phosphate, sodium chloride, dibasic sodium phosphate dihydrate, water and sucrose.

[0025] In specific embodiments, the vaccine is a SAM RNA-based vaccine and comprises one or more SAM RNA vectors of the invention, cholesterol, 1,2-distearoyl-sn-glycero-3-phosphocholine (DSPC), Lipid SM-102, 1,2-dimyristoyl-rac-glycero-3-methoxypolyethylene glycol-2000 (PEG2000-DMG), tromethamine tris(hydroxymethyl)aminomethane), tromethamine hydrochloride, acetic acid, sodium acetate, water, and sucrose.

[0026] In accordance with an aspect of the present invention, there is provided a method of treating, protecting against, and/or preventing infection by a target viral pathogen, including but not limited to a sarbecovirus such as SARS-COV-2, in a subject in need thereof, the method comprising administering one or more of the vaccines of the invention to the subject.

[0027] In accordance with an aspect of the present invention, there is provided a method of generating an immune response against a target viral pathogen, including but not limited to sarbecovirus such as SARS-COV-2, the method comprising administering one or more of the vaccines of the invention to the subject.

[0028] In certain embodiments, the one or more vaccines is administered more than once. In certain embodiments, a prime and boost strategy of vaccination is used. In more specific embodiments, a heterologous prime and boost strategy is utilized. Exemplary prime and boost strategies are known in the art (see for example Sapkota et al. J Travel Med. 2021 Dec. 16; taab191. Doi: 10.1093/jtm/taab191; He et al, Emerg Microbes Infect. 2021; 10(1): 629-637; Kardani et al. Vaccine 2016, 34(4): 413-423).

[0029] In certain embodiments, wherein the subject is a mammal including but not limited to human, cat, dog, horse, sheep, goat, camel or cow.

[0030] In certain embodiments, the vaccines are formulated for parenteral administration, e.g., subcutaneous, intraperitoneal, intravenous, intradermal, and intramuscular. In certain embodiments, the vaccines are formulated for mucosal administration, e.g. oral administration, intranasal, and intravaginal routes.

### BRIEF DESCRIPTION OF THE DRAWINGS

[0031] These and other features of the invention will become more apparent in the following detailed description in which reference is made to the appended drawings.

[0032] FIG. 1 provides a map of a SAM based SARS-COV-2 vaccine of an embodiment of the present invention.

[0033] FIG. 2 provides the nucleic acid sequence of the vaccine from FIG. 1. Sequence represented as DNA for corresponding RNA sequence T is replaced with U.

[0034] FIG. 3 provides a map of a SAM based SARS-COV-2 vaccine of an embodiment of the present invention.

[0035] FIG. 4 provides the nucleic acid sequence of the vaccine from FIG. 3. Sequence represented as DNA for corresponding RNA sequence T is replaced with U.

[0036] FIG. 5 provides a map of a SAM based SARS-COV-2 vaccine of an embodiment of the present invention.

[0037] FIG. 6 provides the nucleic acid sequence of the vaccine from FIG. 5. Sequence represented as DNA for corresponding RNA sequence T is replaced with U.

[0038] FIG. 7 provides a map of a SAM based SARS-COV-2 vaccine of an embodiment of the present invention.

[0039] FIG. 8 provides the nucleic acid sequence of vaccine from FIG. 7. Sequence represented as DNA for corresponding RNA sequence T is replaced with U.

[0040] FIG. 9 provides a map of a SAM based SARS-COV-2 vaccine of an embodiment of the present invention.

[0041] FIG. 10 provides the nucleic acid sequence of vaccine from FIG. 9. Sequence represented as DNA for corresponding RNA sequence T is replaced with U.

[0042] FIG. 11 provides a map of a SAM based SARS-COV-2 vaccine of an embodiment of the present invention.

[0043] FIG. 12 provides the nucleic acid sequence of the vaccine from FIG. 11. Sequence represented as DNA for corresponding RNA sequence T is replaced with U.

[0044] FIG. 13 provides the sequence of concatemers 1 to 4 of SARS-COV-2 epitopes separated by linking sequences expressed by an embodiment of the SARS-COV-2 vaccine of the present invention.

[0045] FIG. 14 provides the sequence of concatemers 1 to 6 of SARS-COV-2 epitopes separated by linking sequences expressed by an embodiment of the SARS-COV-2 vaccine of the present invention.

[0046] FIG. 15 provides the sequence of concatemers 1 to 6 of SARS-COV-2 epitopes separated by linking sequences expressed by an embodiment of the SARS-COV-2 vaccine of the present invention.

[0047] FIG. 16 provides the sequence of concatemers 1 to 6 of SARS-COV-2 epitopes separated by linking sequences expressed by an embodiment of the SARS-COV-2 vaccine of the present invention.

[0048] FIG. 17 provides the sequence of concatemers 1 to 6 of SARS-COV-2 epitopes separated by linking sequences expressed by an embodiment of the SARS-COV-2 vaccine of the present invention.

[0049] FIG. 18 provides the sequence of concatemers 1 to 6 of SARS-COV-2 epitopes separated by linking sequences expressed by an embodiment of the SARS-COV-2 vaccine of the present invention.

[0050] FIG. 19 provides the sequence of concatemers 1 to 4 of SARS-COV-2 epitopes separated by linking sequences expressed by an embodiment of the SARS-COV-2 vaccine of the present invention.

[0051] FIG. 20 provides the sequence of concatemers 1 to 4 of SARS-COV-2 epitopes separated by linking sequences expressed by an embodiment of the SARS-COV-2 vaccine of the present invention.

[0052] FIG. 21 provides the sequence of concatemers 1 to 4 of SARS-COV-2 epitopes separated by linking sequences expressed by an embodiment of the SARS-COV-2 vaccine of the present invention.

[0053] FIG. 22 provides the sequence of concatemers 1 to 4 of SARS-COV-2 epitopes separated by linking sequences expressed by an embodiment of the SARS-COV-2 vaccine of the present invention.

[0054] FIG. 23 provides the sequence of concatemers 1 to 4 of SARS-COV-2 epitopes separated by linking sequences expressed by an embodiment of the SARS-COV-2 vaccine of the present invention.

### DETAILED DESCRIPTION OF THE INVENTION

[0055] The present invention provides vaccines for viral pathogens which confer protection against a wide spectrum of strains of the target viral pathogen, including but not limited to a sarbecovirus. For example, in certain embodiments, by comprising or expressing multiple epitopes from a number of highly conserved genes of SARS-COV-2, the vaccines confer protection against a wide spectrum of strains of SARS-COV-2, therein including mutated strains arising in the future in the population and escape mutants generated in the future by other vaccines that only target a subset of the viral proteins (for instance, the spike protein alone). In addition, in certain embodiments, the vaccines are tailored to a majority of immunotypes present in the target population, the vaccines confer protection to a wide spectrum of individuals, irrespective of the make-up of their immune system in terms of MHC genes.

[0056] In certain embodiments, the invention provides vaccines against coronaviruses, including but not limited to a Sarbecovirus. In certain embodiments, the invention provides vaccines against SARS-associated coronaviruses (SARS-COV). In specific embodiments, the invention provides vaccines against SARS-COV-2. Also provided are pharmaceutical compositions comprising the vaccines and methods of generating a protective immune response against RNA viruses. In specific embodiments, there is provided pharmaceutical compositions comprising the vaccines and methods of generating a protective immune response against the SARS-COV viral pathogens.

[0057] The vaccines may trigger a humoral (B-cell) and/or cellular (T-cell response). In certain embodiments, the vaccine comprises or expresses T-cell MHC-I (e.g. HLA-I) and/or MHC-II (e.g. HLA-II) epitopes of one or more RNA viral pathogens. In certain embodiments, the vaccine comprises or expresses T-cell MHC-I (e.g. HLA-I) and/or MHC-II (e.g. HLA-II) epitopes of one or more specific SARS-COV pathogens. In certain embodiments, the epitopes are T-cell MHC-I (e.g. HLA-I) and/or MHC-II (e.g. HLA-II) epitopes of one or more SARS-COV-2 proteins.

[0058] In principle, a vaccine needs to comprise or express one epitope that binds an individual's MHC alleles for the vaccine to have activity in the individual. Accordingly, in certain embodiments, the vaccine comprises or expresses epitopes for all MHC I and MHC II alleles with a frequency >1% (or another suitably selected frequency) in the target population, so as to achieve a vaccine capable of conferring protection to a wide spectrum of individuals irrespective of their MHC type. HLA types are distributed geographically, accordingly, in certain embodiments the target population is geographically limited.

[0059] In addition, it is known in the certain HLA types are associated with autoimmunity such as ankylosing spondylitis (HLA B27) or arthritis (HLA DR4). Accordingly toxicity related to autoimmunity may be reduced by omitting peptides that bind to these HLA types.

### Vaccine Platforms

[0060] A variety of platforms may be used to generate the vaccines of the present invention. Exemplary vaccine platforms which may be used include but are not limited to protein-based platforms, virus-like particle-based vaccines, viral vector-based platforms and nucleic acid-based vaccine platforms.

[0061] In certain embodiments, the vaccine platform is a viral vector-based platform. The viral vectors may be attenuated viruses, may be replicating or non-replicating. Exemplary viral vectors include not are not limited to adenovirus, vaccinia or adeno associated virus, lentivirus or vesicular stomatitis virus (VSV). Accordingly, in certain embodiments the vaccine platform is an adenovirus, vaccinia or adeno associated virus, lentivirus or Vesicular stomatitis virus based vaccine.

[0062] In specific embodiments, the viral vector platform is an adenovirus vector platform. Various serotypes of adenoviruses have been used in vaccine development including Ad5, Ad26 and Ad35. In certain embodiments, the adenovirus vector is based on a simian adenovirus. Use of simian adenovirus vaccine vectors circumvent pre-existing human adenovirus immunity.

[0063] Exemplary, simian adenovirus serotypes used in vaccine development include simian adenovirus type 23.

[0064] In certain embodiments, the vaccine platform is a nucleic acid-based platform. Nucleic acid-based vaccine platforms may be DNA or RNA-based. Optionally, the nucleic acids include one or more modified nucleosides.

[0065] In certain embodiments, the nucleic acid-based vaccine platform is a DNA-based vaccine platform. Appropriate DNA expression vectors for use as a DNA-based vaccine platform are known in the art. A worker skilled in the art would readily appreciate that such expression vectors include the necessary elements to allow for expression of the one or more immunogens. Such elements include a promoter, such as the CMV promoter which directs transcription of the mRNA encoded by the transgene, a polyadenylation signal which mediates mRNA cleavage and polyadenylation, and Kozak sequence which directs efficient transgene translation. In specific embodiments, the DNA-based vaccine is a plasmid-based vaccine. In certain embodiments the vaccine has been optimized for expression of the assembled epitopes. In certain embodiments, the vaccines comprise nucleic acid sequence expressing said concatemer of epitopes which is less than 20 kb in length.

[0066] In certain embodiments, the vaccine comprises a sequence which has been codon optimized or deoptimized.

[0067] In certain embodiments, the nucleic acid-based vaccine is a RNA-based vaccine platform. In specific embodiments, a mRNA platform. The mRNA-based vaccine platform may be non-replicating or self-amplifying. In certain embodiments, the nucleic acid-based vaccine platform is a self-amplifying (SAM) RNA platform. A variety of RNA based expression systems are known in the art, including but not limited to expression systems based on either positive-sense and negative-sense RNA viruses. Positive-strand RNA viruses used in the development expression system include but are not limited to alphaviruses and flaviviruses. Exemplary alphaviruses used for expression systems include but are not limited to Semliki Forest virus, Venezuelan equine encephalitis virus and Sindbis virus and poliovirus. Alphavirus replicon particle-based vaccine vectors derived from Sindbis virus (SIN), Semliki Forest virus (SFV), and Venezuelan equine encephalitis virus (VEE) have been shown to induce robust antigen-specific cellular, humoral, and mucosal immune responses in many animal models of infectious disease and cancer (Perri et al.; Journal of Virology September 2003, 77 (19) 10394-10403; DOI: 10.1128/JVI.77.19.10394-10403.2003; Karl Ljungberg & Peter Liljeström (2015) Self-replicating alphavirus RNA vaccines, Expert Review of Vaccines, 14:2, 177-194, DOI: 10.1586/14760584.2015.965690). Exemplary flavivirus used for expression systems include Kunjin flavivirus. Negative sense RNA virus systems include measles and rhabdoviruses.

[0068] In specific embodiments, the SAM RNA vaccine platform is derived from an alphavirus. In such embodiments, the mRNA replicates through a double stranded RNA intermediate, and the antigen of interest replaces structural proteins, so no infectious virus is made.

### Epitopes

[0069] The multi-epitope vaccines of the present invention comprise or expresses epitopes of one or more viral proteins.

[0070] In certain embodiments, the vaccine comprises or expresses one or more epitopes from conserved (such as structural proteins) viral proteins and one or more variable (hypervariable) viral proteins (such as spike protein from SARS-COV2). By comprising or expressing both types of epitopes, the vaccine is likely to be much less prone to generate escape mutants and is more likely to confer sterilizing immunity while targeting a number of circulating variants. In addition, in certain embodiments, by comprising or expressing epitopes for all MHC I and MHC II alleles with a frequency >1% in the general human population are chosen, so as to be effective in a large portion of the population.

[0071] The vaccine may comprise or express MHC I epitopes and/or MHC II epitopes of one or more viral proteins. In certain embodiments, the epitopes are T-cell MHC-I (e.g. HLA-I) and/or MHC-II (e.g. HLA-II) epitopes of one or more RNA viral proteins. In certain embodiments, the epitopes are T-cell MHC-I (e.g. HLA-I) and/or MHC-II (e.g. HLA-II) epitopes of one or more coronavirus proteins. In certain embodiments, the epitopes are T-cell MHC-I (e.g. HLA-I) and/or MHC-II (e.g. HLA-II) epitopes of one or more sarbecovirus proteins. In certain embodiments, the epitopes are T-cell MHC-I (e.g. HLA-I) and/or MHC-II (e.g. HLA-II) epitopes of one or more SARS-COV proteins. In certain embodiments, the epitopes are T-cell MHC-I (e.g. HLA-I) and/or MHC-II (e.g. HLA-II) epitopes of one or more SARS-COV-2 proteins. In certain embodiments, the epitopes are T-cell MHC-I (e.g. HLA-I) and/or MHC-II (e.g. HLA-II) epitopes of one or more SARS-COV-2 proteins. In specific embodiments, the vaccine comprises or expresses MHC-I and MHC-II epitopes.

[0072] In certain embodiments, the vaccine comprises or expresses multiple epitopes from conserved (such as structural proteins) and variable (hypervariable) proteins (such as spike protein from SARS-COV2).

[0073] In certain embodiments, each epitope comprises an amino acid sequence between 5 and 60 amino acids. In certain embodiments, the epitopes comprise a sequence comprising 8 to 44 amino acids. In certain embodiments, the epitopes comprise a sequence comprising 8 to 30 amino acids. In certain embodiments, the epitopes comprise a sequence comprising 8 to 22 amino acids. In certain embodiments, the vaccine comprises or expresses MHC I epitopes comprising a sequence comprising 8 to 15 amino acids. In certain embodiments, the vaccine comprises or expresses MHC II epitopes comprising a sequence comprising 9 to 22 amino acids. In certain embodiments, the vaccine comprises or expresses MHC II epitopes comprising a sequence comprising more than 13 amino acids.

[0074] In certain embodiments, the sequence of the epitope(s) the vaccine comprises or expresses is 100% identical to the sequence of the corresponding epitope(s) in the wild-type viral protein. In certain embodiments, the sequence of the epitope(s) the vaccine comprises or expresses comprises one or more substitutions, insertions and/or deletions of one or more amino acid residues as compared to the sequence of the epitope in the wild-type viral protein. In certain embodiments, the epitope(s) the vaccine comprises at least 50%, at least 60%, at least 70%, at least 75%, at least 80%, at least 85%, at least 90%, at least 95%, at least 98%, at least 99% sequence identity as compared to a reference epitope sequence. The reference sequence may be any of the viral epitope sequences disclosed herein or known in the art.

[0075] In certain embodiments, the sequence of the epitope(s) of the vaccine is derived from the consensus sequence of more than one viral sequence. In certain embodiments, such sequence is obtained by considering the consensus of the most frequent variants appearing in different viral strains or in any number of sequenced viruses that have been detected while circulating in the population. In certain embodiments, such a sequence is obtained by removing from the original sequence the positions at which variants occur with a frequency larger than a specified frequency threshold (i.e., hypervariable positions in the sequence are removed, and only the positions in the sequence that are sufficiently constant are kept). In certain embodiments, additional sequences, encompassing the positions at which variants appear more frequently than some specified threshold, are added to the original sequence of the virus (i.e., one adds to the pool of potential peptides the ones generated by non-synonymous variants that occur with sufficient frequency). In certain embodiments, the variants which appear more frequently than some specific threshold are computed based on the strains circulating at some given time in some specific geographical region. In certain embodiments. In certain embodiments, the variants which appear more frequently than some specific threshold are computed based on viral lineages as defined by WHO, other public bodies, or research groups.

[0076] In certain embodiments, one or more epitopes are derived from one or more sarbecovirus proteins, including but not limited to SARS-COV proteins including but not limited to SARS-COV-2 proteins.

[0077] The complete genome of SARs-COV-2 is known in the art and is published under GenBank Accession NC_045512.2 (Nature 579 (7798), 265-269 (2020)). Variants of SARS-COV-2 are known in the art. The targets of T cell responses to SARS-COV-2 have been examined in exposed individuals. The targets were found to include but are not limited to M, Spike, N, nsp3, nsp4, ORF3a and ORF8 (Grifoni et al., Cell 181:1489-1501, 2020). Accordingly, in certain embodiments, the selection of epitopes is based on the clinical profile of convalescent COVD-19 patients. In specific embodiments, the selection of epitopes is based on the frequency of antigen specific T cell responses that convalescent patients make for both T helper (MHC II) and CTL (MHC I). In certain embodiments, eptiopes were selected based on antigenic score of the epitopes. In specific embodiments, the vaccine comprises MHC I and MHC II binding epitopes for different HLA Alleles. In specific embodiments, the vaccine comprises MHC I and MHC II binding epitopes for all MHC I and MHC II alleles with a frequency >1% in the general human population are chosen.

[0078] In certain embodiments, the vaccine comprises or expresses one or more epitopes from one or more of the following SARS-COV-2 proteins: spike, NSP1, NSP2, Proteinase 3CL-Pro, NSP7, NSP8, NSP9, NSP10, helicase, exonuclease, endonuclease, methyltransferase, ORF6, N protein, and ORF10.

[0079] In certain embodiments, the vaccine comprises or expresses one or more epitopes from one or more of the following SARS-COV-2 proteins: spike, papain-like protease, NSP4, RNA dependent RNA polymerase, M protein, ORF7a, and ORF8.

[0080] In certain embodiments, the vaccine comprises or expresses one or more epitopes from one or more of the following SARS-COV-2 proteins: 2′-O-ribose methyltransferase, 3C-like proteinase, 3′-to-5′ exonuclease, endoRNAse, envelope protein, helicase, leader protein, membrane glycoprotein, nsp10, nsp2, nsp3, nsp4, nsp6, nsp7, nsp8, nsp9, nucleocapsid phosphoprotein, ORF10 protein, ORF3a protein, ORF6 protein, ORF7a protein, ORF8 protein, RNA-dependent RNA polymerase, and surface glycoprotein.

[0081] In certain embodiments, the vaccine comprises or expresses one or more epitopes as set forth in any one of Tables below. In certain embodiments, the vaccine comprises or expresses one or more of the concatemer of epitopes (optionally the epitopes are separated by a linker sequence) as set forth in any one of Tables below.

[0082] In certain embodiments, the vaccine comprises or expresses one or more epitopes as set forth in any one of SEQ ID NOs 1-789. In certain embodiments, the vaccine comprises or expresses one or more of the concatemer of epitopes (optionally the epitopes are separated by a linker sequence) as set forth in any one of SEQ ID NOs 1-789. In specific embodiments, the linkers comprise the sequence as set forth in 790 or 791.

[0083] In certain embodiments, the vaccine comprises one or more nucleic acids capable of expressing one or more of the epitopes or concatemers of epitopes optionally separated by linker sequences described above. The one or more nucleic acids may be DNA or RNA. The vaccine comprising or capable of expressing the one or more epitopes may be virus-like particle-based vaccines, viral vector-based vaccines or nucleic acid-based vaccines. In nucleic acid-based vaccines, the nucleic acids may optionally include modifications including for example one or more modified nucleosides. In certain embodiments, the nucleic acid sequences are codon optimized. In certain embodiments, the nucleic acid sequences are codon optimized for expression in mammalian cells, optionally human cells. In certain embodiments, the nucleic acid sequences are deoptimized.

### Linkers Between Epitopes

[0084] In certain embodiments, the vaccines comprise or express one or more concatemer(s) of epitopes with intervening linker peptides. In certain embodiments, the linker peptides comprise a protease cleavage site(s). In certain embodiments, the insertion of protease cleavage sites enhances antigen processing. Exemplary cleavage sites include chymotryptic, tryptic and furin cleavage sties. In specific embodiments, the linker consists of other viral and cellular protease sites. In specific embodiments, the linker peptides comprise the following sequence: RY, KRY, RYP, PRRARSV, PRRARSVKRY or PRRARSVRYP. In certain embodiments, the linker can be any peptide consistent with the motif [AVTP][TKRV]LQ[AS]. In specific embodiments, the linker consists of the following sequence: ATLQA. In specific embodiments, the linker consists of the following sequence: QEAGAG. In specific embodiments, the linker consists of the following sequence: LALAA.

### Exemplary Concatemers of Epitopes

[0085] In certain embodiments, the vaccine comprises or expresses at least one of concatemers of epitopes from SARS-COV-2 with intervening linker sequences set forth in Table 1 below. In certain embodiments, the vaccine comprises or expresses at least two of the concatemers of epitopes from SARS-COV-2 with intervening linker sequences set forth in Table 1 below. In certain embodiments, the vaccine comprises or expresses three of the concatemers set forth below. In certain embodiments, the vaccine comprises or expresses all the concatemers set forth below in Table 1.

TABLE 1

| | pos_in_ | | | pos_ |
|---|---|---|---|---|
| concatemer | concatemer | epitope | gene | in_gene |
| 1 | 1-12 | LNVPLHGTILTR | membrane_glycoprotein(26523-27191 | 120-131 |
| 1 | 13-22 | PRRARSVRYP linker 1-10 | | |
| 1 | 23-35 | TVLKKCKSAFYIL | nsp3(2720-8554 | 526-538 |
| 1 | 36-45 | PRRARSVRYP linker 1-10 | | |
| 1 | 46-53 | IETISLAG | nsp3(2720-8554) | 684-691 |
| 1 | 54-63 | PRRARSVRYP linker 1-10 | | |
| 1 | 64-73 | NWNCVNCDTF | nsp3*2720-8554) | 1631-1640 |
| 1 | 74-83 | PRRARSVRYP linker 1-10 | | |
| 1 | 84-97 | DYDCVSFCYMHHME | 3C-like proteinase (10055-10972) | 153-166 |
| 1 | 98-107 | PRRARSVRYP linker 1-10 | | |
| 1 | 108-117 | TPLIQPIGAL | nsp4(8555-10054) | 269-278 |
| 1 | 118-127 | PRRARSVRYP linker 1-10 | | |
| 1 | 128-154 | VTGLFKDCSKVITGLHPTQAPTHLSVD | 3′-to-5′_exonuclease(18040-19620) | 4-30 |
| 1 | 155-164 | PRRARSVRYP linker 1-10 | | |
| 1 | 165-179 | SDVLYQPPQTSITSA | nsp4(8555-10054) | 483-497 |
| 1 | 180-189 | PRRARSVRYP linker 1-10 | | |
| 1 | 190-200 | TKVDGVDVELF | endoRNAse(19621-20658) | 33-43 |
| 1 | 201-210 | PRRARSVRYP linker 1-10 | | |
| 1 | 211-221 | ETICAPLTVFF | endoRNAse(19621-20658) | 113-123 |
| 1 | 222-231 | PRRARSVRYP linker 1-10 | | |
| 1 | 232-246 | KETLYCIDGALLTKS | nsp3(2720-8554) | 1024-1038 |
| 1 | 247-256 | PRRARSVRYP linker 1-10 | | |
| 1 | 257-270 | QIELKFNPPALQDA | nsp3(2720-8554) | 867-880 |
| 1 | 271-280 | PRRARSVRYP linker 1-10 | | |
| 1 | 281-298 | HVQLSLPVLQVRDVLVRG | leader_protein(266-805) | 13-30 |
| 1 | 299-308 | PRRARSVRYP linker 1-10 | | |
| 1 | 309-316 | DHVISTSH | helicase(16237-18039) | 32-39 |
| 1 | 317-326 | PRRARSVRYP linker 1-10 | | |
| 1 | 327-339 | ANFCALILAYCNK | nsp3(2720-8554) | 890-902 |
| 1 | 340-349 | PRRARSVRYP linker 1-10 | | |
| 1 | 350-357 | LPINVIVF | nsp3(2720-8554) | 1718-1725 |
| 1 | 358-367 | PRRARSVRYP linker 1-10 | | |
| 1 | 368-381 | CATTRQVVNVVTTK | nsp3(2720-8554) | 1926-1939 |
| 1 | 382-391 | PRRARSVRYP linker 1-10 | | |
| 1 | 392-399 | YDKLVSSF | nsp3(2720-8554) | 365-372 |
| 1 | 400-409 | PRRARSVRYP linker 1-10 | | |
| 1 | 410-418 | KFPLKLRGT | 2′-O-ribose_methyltransferase | 249-257 |
| | | | (20659-21552) | |
| 1 | 419-428 | PRRARSVRYP linker 1-10 | | |
| 1 | 429-438 | KSASVYYSQL | nsp3(2720-8554) | 1737-1746 |
| 1 | 439-448 | PRRARSVRYP linker 1-10 | | |
| 1 | 449-463 | TYACWHHSIGFDYVY | 3′-to-5′_exonuclease(10840-19620) | 223-237 |
| 1 | 464-473 | PRRARSVRYP linker 1-10 | | |
| 1 | 474-486 | AIKCVPQADVEWK | 3′-to-5′_exonuclease(10840-19620) | 337-349 |
| 1 | 487-496 | PRRARSVRYP linker 1-10 | | |
| 1 | 497-510 | SDRVVFVLWAHGFE | 3′-to-5′_exonuclease(10840-19620) | 178-191 |
| 1 | 511-520 | PRRARSVRYP linker 1-10 | | |
| 1 | 521-544 | TYASALWEIQQVVDADSKIVQLSE | nsp8(12092-12685) | 148-171 |
| 1 | 545-554 | PRRARSVRYP linker 1-10 | | |
| 1 | 555-562 | YLKLRSDV | nsp4(8555-10054) | 427-434 |
| 1 | 563-572 | PRRARSVRYP linker 1-10 | | |
| 1 | 573-586 | DGCVPLNIIPLTTA | nsp8(12092-12685) | 112-125 |
| 1 | 587-596 | PRRARSVRYP linker 1-10 | | |
| 1 | 597-609 | KEILVTYNCCDDD | RNA-dependent_RNA_polymerase | 143-155 |
| | | | (13442-13468 + 13468-16236) | |
| 1 | 610-619 | PRRARSVRYP linker 1-10 | | |
| 1 | 620-627 | SDFVRATA | ORF3a protein(25393-26220) | 26-33 |
| 1 | 628-637 | PRRARSVRYP linker 1-10 | | |
| 1 | 638-650 | GVVDYGARFYFYT | nsp3(2720-8554) | 596-608 |
| 1 | 651-660 | PRRARSVRYP linker 1-10 | | |
| 1 | 661-674 | QEHYVRITGLYPTL | helicase(16237-18039) | 243-256 |
| 1 | 675-684 | PRRARSVRYP linker 1-10 | | |
| 1 | 685-707 | TFKVSIWLNLDYIINLIIKNLSKS | ORF6_protein(27202-27387) | 21-43 |
| 1 | 708-717 | PRRARSVRYP linker 1-10 | | |
| 1 | 718-730 | FVVEVVDKYFDCY | RNA-dependent_RNA_polymerase | 471-483 |
| | | | (13442-13468 + 13468-16236) | |
| 1 | 731-740 | PRRARSVRYP linker 1-10 | | |
| 1 | 741-753 | YTVSCLPFTINCQ | ORF8_protein(27894-28259) | 79-91 |
| 1 | 754-763 | PRRARSVRYP linker 1-10 | | |
| 1 | 764-778 | EILDITPCSFGGVSV | surface_glycoprotein(21563-25384) | 583-597 |
| 1 | 779-788 | PRRARSVRYP linker 1-10 | | |
| 1 | 789-798 | MPLGYVTHGL | nsp3(2720-8554) | 630-639 |
| 1 | 799-808 | PRRARSVRYP linker 1-10 | | |
| 1 | 809-816 | MADLVYAL | RNA-dependent_RNA_polymerase | 124-131 |
| | | | (13442-13468 + 13468-16236) | |
| 1 | 817-826 | PRRARSVRYP linker 1-10 | | |
| 1 | 827-840 | TSACVLAAECTIFK | nsp4(8555-10054) | 147-160 |
| 1 | 841-850 | PRRARSVRYP linker 1-10 | | |
| 1 | 851-866 | SAEVAVKMFDAYVNTF | nsp3(2720-8554) | 1765-1780 |
| 1 | 867-876 | PRRARSVRYP linker 1-10 | | |
| 1 | 877-886 | NEFYAYLRKH | RNA-dependent_RNA_polymerase | 743-752 |
| | | | (13442-13468 + 13468-16236) | |
| 1 | 887-896 | PRRARSVRYP linker 1-10 | | |
| 1 | 897-906 | LQYGSFCTQL | surface_glycoprotein(21563-25384) | 754-763 |
| 1 | 907-916 | PRRARSVRYP linker 1-10 | | |
| 1 | 917-925 | IQLSSYSLF | 2′-O-ribose_methyltransferase | 237-245 |
| | | | (20659-21552) | |
| 1 | 926-935 | PRRARSVRYP linker 1-10 | | |
| 1 | 936-946 | CTLKSFTVEKG | surface_glycoprotein(21563-25384) | 301-311 |
| 1 | 947-956 | PRRARSVRYP linker 1-10 | | |
| 1 | 957-964 | PSFLGRYM | nsp3(2720-8554) | 822-829 |
| 1 | 964-974 | PRRARSVRYP linker 1-10 | | |
| 1 | 975-989 | ISNCVADYSVLYNSA | surface_glycoprotein(21563-25384) | 358-372 |
| 1 | 990-999 | PRRARSVRYP linker 1-10 | | |
| 1 | 1000-1011 | ESVTTEILPVSM | surface_glycoprotein(21563-25384) | 720-731 |
| 1 | 1012-1021 | PRRARSVRYP linker 1-10 | | |
| 1 | 1022-1041 | SEAVEAPLVGTPVCINGLML | nsp2(806-2719) | 591-610 |
| 1 | 1042-1051 | PRRARSVRYP linker 1-10 | | |
| 1 | 1052-1061 | FDVEGCHATR | 3′-to-5′_exonuclease(10840-19620) | 89-98 |
| 1 | 1062-1071 | PRRARSVRYP linker 1-10 | | |
| 1 | 1072-1086 | ERFVSLAIDAYPLTK | RNA-dependent_RNA_polymerase | 857-871 |
| | | | (13442-13468 + 13468-16236) | |
| 1 | 1087-1096 | | | |
| 1 | 1097-1113 | PRRARSVRYP linker 1-10 | RNA-dependent_RNA_polymerase | 717-733 |
| | | | (13442-13468 + 13468-16236) | |
| 1 | 1114-1123 | PRRARSVRYP linker 1-10 | | |
| 1 | 1124-1160 | FHQECSLQSCTQHQPYVVDDPCPIHFY | ORF8_protein(27894-28259) | 16-52 |
| | | SKWYIRVGAR | | |
| 1 | 1161-1170 | PRRARSVRYP linker 1-10 | | |
| 1 | 1171-1189 | KLNVGDYFVLTSHTVMPLS | helicase(16237-18039) | 218-236 |
| 1 | 1190-1199 | PRRARSVRYP linker 1-10 | | |
| 1 | 1200-1207 | TSCCSCLK | surface_glycoprotein | 1238-1245 |
| | | | (21563-25384) | |
| 1 | 1208-1217 | PRRARSVRYP linker 1-10 | | |
| 1 | 1218-1225 | AALQIPFA | surface_glycoprotein | 892-899 |
| | | | (21563-25384) | |
| 1 | 1226-1235 | PRRARSVRYP linker 1-10 | | |
| 1 | 1236-1243 | NQMCLSTL | nsp2(806-2719) | 133-140 |
| 1 | 1244-1253 | PRRARSVRYP linker 1-10 | | |
| 1 | 1254-1265 | GSNVFQTRAGCL | surface_glycoprotein | 639-650 |
| | | | (21563-25384) | |
| 1 | 1266-1275 | PRRARSVRYP linker 1-10 | | |
| 1 | 1276-1285 | KASCTLSEQL | NSP2(806-2719) | 30-39 |
| 1 | 1286-1295 | PRRARSVRYP linker 1-10 | | |
| 1 | 1296-1323 | IKDLPKEITVATSRTLSYYKLGASQRV | membrane_glycoprotein | 161-188 |
| | | A | (26523-27191) | |
| 1 | 1324-1333 | PRRARSVRYP linker 1-10 | | |
| 1 | 1334-1343 | ARDLICAQKF | surface_glycoprotein | 846-855 |
| | | | (21563-25384) | |
| 1 | 1344-1353 | PRRARSVRYP linker 1-10 | | |
| 1 | 1354-1361 | SQDLSVVS | endoRNAse(19621-20658) | 308-315 |
| 1 | 1362-1371 | PRRARSVRYP linker 1-10 | | |
| 1 | 1372-1379 | DVVECLKL | nsp3(2720-8554) | 1832-1839 |
| 1 | 1380-1389 | PRRARSVRYP linker 1-10 | | |
| 1 | 1390-1407 | INVFAFPFTIYSLLLCRM | ORF10_protein(29558-29674) | 4-21 |
| 2 | 1-10 | DKLQFTSLEI | helicase(16237-18039) | 583-592 |
| 2 | 11-20 | PRRARSVRYP linker 1-10 | | |
| 2 | 21-33 | SYELQTPFEIKLA | nsp2(806-2719) | 68-80 |
| 2 | 34-43 | PRRARSVRYP linker 1-10 | | |
| 2 | 44-51 | GYVMHANY | 2′-O-ribose_methyltransferase | 221-228 |
| | | | (20659-21552) | |
| 2 | 52-61 | PRRARSVRYP linker 1-10 | | |
| 2 | 62-94 | YEPLTQDHVDILGPLSAQTGAIVLDM | 3C-like_proteinase | 239-271 |
| | | CASLKEL | | |
| 2 | 95-104 | PRRARSVRYP linker 1-10 | | |
| 2 | 105-112 | RVEAFEYY | nsp3(2720-8554) | 810-817 |
| 2 | 113-122 | PRRARSVRYP linker 1-10 | | |
| 2 | 123-132 | EGSVRVVTTF | nsp4(8555-10054) | 207-216 |
| 2 | 133-142 | PRRARSVRYP linker 1-10 | | |
| 2 | 143-155 | QCVQLHNDILLAK | nsp7(11843-12091) | 31-43 |
| 2 | 156-165 | PRRARSVRYP linker 1-10 | | |
| 2 | 166-180 | GETFVTHSKGLYRKC | nsp2(806-2719) | 526-540 |
| 2 | 181-190 | PRRARSVRYP linker 1-10 | | |
| 2 | 191-205 | FSGYLKLTDNVYIKN | nsp3(2720-8554) | 210-224 |
| 2 | 206-215 | PRRARSVRYP linker 1-10 | | |
| 2 | 216-225 | GEVPVSIINN | endoRNAse(19621-20658) | 20-29 |
| 2 | 226-235 | PRRARSVRYP linker 1-10 | | |
| 2 | 236-260 | KVKPTVVVNAANVYLKHGGGVAGAL | nsp3(2720-8554) | 233-257 |
| 2 | 261-270 | PRRARSVRYP linker 1-10 | | |
| 2 | 271-285 | TKYLVQQESPFVMMS | nsp3(2720-8554) | 976-990 |
| 2 | 286-295 | PRRARSVRYP linker 1-10 | | |
| 2 | 286-307 | GDVVAIDYKHYT | nsp3(2720-8554) | 1147-1158 |
| 2 | 308-317 | PRRARSVRYP linker 1-10 | | |
| 2 | 318-325 | LMVVIPDY | nsp8(12092-12685) | 128-135 |
| 2 | 326-335 | PRRARSVRYP linker 1-10 | | |
| 2 | 336-352 | KHWPQIAQFAPSASAFF | nucleocapsid_phosphoprotein | 299-315 |
| | | | (28274-29533) | |
| 2 | 353-362 | PRRARSVRYP linker 1-10 | | |
| 2 | 363-376 | SVGKFCLEASFNYL | nsp3(2720-8554) | 1387-1400 |
| 2 | 377-386 | PRRARSVRYP linker 1-10 | | |
| 2 | 377-397 | ITNCVNKLCTH | nsp10(13025-13441) | 38-48 |
| 2 | 398-407 | PRRARSVRYP linker 1-10 | | |
| 2 | 408-518 | ASCCLYCRCHI | nsp10(13025-13441) | 71-81 |
| 2 | 419-428 | PRRARSVRYP linker 1-10 | | |
| 2 | 429-451 | FGGCVFSYVGCHNKCAYWVPRAS | nsp2(806-2719) | 226-248 |
| 2 | 452-461 | PRRARSVRYP linker 1-10 | | |
| 2 | 462-496 | HEFCSQHTMLVKQGDDYVYLPYPDPSR | RNA-dependent_RNA_polymerase | 810-844 |
| | | ILGAGCFV | (13442-13468 + 13468-16236) | |
| 2 | 497-506 | PRRARSVRYP linker 1-10 | | |
| 2 | 507-520 | FGTVYEKLKPVLDW | nsp2(806-2719) | 437-450 |
| 2 | 521-530 | PRRARSVRYP linker 1-10 | | |
| 2 | 531-538 | EHIVYGDF | endoRNAse(19621-20658) | 233-240 |
| 2 | 539-548 | PRRARSVRYP linker 1-10 | | |
| 2 | 549-566 | KILNNLGVDIAANTVIWD | endoRNAse(19621-20658) | 70-87 |
| 2 | 567-579 | PRRARSVRYP linker 1-10 | | |
| 2 | 577-586 | LAWPLIVTAL | nsp8(12092-12685) | 180-189 |
| 2 | 587-596 | PRRARSVRYP linker 1-10 | | |
| 2 | 597-610 | LSPVALRQMSCAAG | nsp9(12092-12685) | 4-17 |
| 2 | 611-620 | PRRARSVRYP linker 1-10 | | |
| 2 | 621-632 | YAKPFLNKVVST | nsp3(2720-8554) | 1323-1334 |
| 2 | 633-642 | PRRARSVRYP linker 1-10 | | |
| 2 | 643-650 | TFSVLACY | 3C-like_protinase(10055-10972) | 111-118 |
| 2 | 651-660 | PRRARSVRYP linker 1-10 | | |
| 2 | 661-668 | VAFNVVNK | endoRNAse(19621-20658) | 5-12 |
| 2 | 669-678 | PRRARSVRYP linker 1-10 | | |
| 2 | 679-715 | ARKHTTCCSLCHRFYRLANECAQVLSE | RNA-dependent_RNA_polymerase | 639-675 |
| | | MVMCGGSLYV | (13442-13468 + 13468-16236) | |
| 2 | 716-725 | PRRARSVRYP linker 1-10 | | |
| 2 | 726-741 | LVDFQVTIAEILLIIM | ORF6_protein(27202-27387) | 4-19 |
| 2 | 742-751 | PRRARSVRYP linker 1-10 | | |
| 2 | 752-761 | CPRHVICTSE | 3C-like_protinase(10055-10972) | 38-47 |
| 2 | 762-771 | PRRARSVRYP linker 1-10 | | |
| 2 | 772-787 | LLKDCPAVAKHDFFKF | RNA-dependent_RNA_polymerase | 89-104 |
| | | | (13442-13468 + 13468-16236) | |
| 2 | 788-797 | PRRARSVRYP linker 1-10 | | |
| 2 | 798-813 | RKIFVDGVPFVVSTGY | RNA-dependent_RNA_polymerase | 331-346 |
| | | | (13442-13468 + 13468-16236) | |
| 2 | 814-823 | PRRARSVRYP linker 1-10 | | |
| 2 | 824-843 | RAKHYVYIGDPAQLPAPRTL | helicase(16237-18039) | 392-411 |
| 2 | 844-853 | PRRARSVRYP linker 1-10 | | |
| 2 | 854-863 | TLPVNVAFEL | endoRNAse(19621-20658) | 48-57 |
| 2 | 864-873 | PRRARSVRYP linker 1-10 | | |
| 2 | 874-888 | FSVAALTNNVAFQTV | RNA-dependent_RNA_polymerase | 396-410 |
| | | | (13442-13468 + 13468-16236) | |
| 2 | 889-898 | PRRARSVRYP linker 1-10 | | |
| 2 | 899-906 | SVELKHFF | RNA-dependent_RNA_polymerase | 434-411 |
| | | | (13442-13468 + 13468-16236) | |
| 2 | 907-916 | PRRARSVRYP linker 1-10 | | |
| 2 | 917-928 | FNVYFPLQSYGF | surface_glycoprotein(21563-25384) | 486-497 |
| 2 | 929-938 | PRRARSVRYP linker 1-10 | | |
| 2 | 939-952 | FFSNVTWFHAIHVS | surface_glycoprotein(21563-25384) | 58-71 |
| 2 | 953-962 | PRRARSVRYP linker 1-10 | | |
| 2 | 963-974 | EVFAQVKQIYKT | surface_glycoprotein(21563-25384) | 780-791 |
| 2 | 975-984 | PRRARSVRYP linker 1-10 | | |
| 2 | 985-994 | YIAQVDVVNF | ORF10_protein(29558-29674) | 26-36 |
| 2 | 995-1004 | PRRARSVRYP linker 1-10 | | |
| 2 | 1005-1014 | LLKHPIVWHV | nsp3(2720-8554) | 1167-1176 |
| 2 | 1015-1024 | PRRARSVRYP linker 1-10 | | |
| 2 | 1025-1042 | YQDVNCTEVPVAIHADQL | surface_glycoprotein(21563-25384) | 612-629 |
| 2 | 1043-1052 | PRRARSVRYP linker 1-10 | | |
| 2 | 1053-1076 | SELVIGAVILRGHLRIAGHHLGRC | membrane_glycoprotein | 136-159 |
| | | | (26523-27191) | |
| 2 | 1077-1086 | PRRARSVRYP linker 1-10 | | |
| 2 | 1087-1094 | TDAVDCAL | surface_glycoprotein(21563-25384) | 286-293 |
| 2 | 1095-1104 | PRRARSVRYP linker 1-10 | | |
| 2 | 1105-1112 | SLIDLQEL | surface_glycoprotein(21563-25384) | 1196-1203 |
| 2 | 1113-1122 | PRRARSVRYP linker 1-10 | | |
| 2 | 1123-1135 | RTCCLCDRRATCF | 3′-to-5′_exonuclease(18040-19620) | 205-217 |
| 2 | 1136-1145 | PRRARSVRYP linker 1-10 | | |
| 2 | 1146-1153 | FVKATCEF | nsp2(806-2719) | 156-163 |
| 2 | 1154-1163 | PRRARSVRYP linker 1-10 | | |
| 2 | 1164-1179 | NFLVQAGNVQLRVIGH | 3C-like_protinase(10055-10972) | 65-80 |
| 2 | 1180-1189 | PRRARSVRYP linker 1-10 | | |
| 2 | 1190-1197 | EVTPSGTW | nucleocapsid_phosphoprotein | 323-330 |
| | | | (28274-29533) | |
| 2 | 1198-1207 | PRRARSVRYP linker 1-10 | | |
| 2 | 1208-1217 | FKHLIPLMYK | 3′-to-5′_exonuclease(18040-19620) | 146-155 |
| 2 | 1218-1227 | PRRARSVRYP linker 1-10 | | |
| 2 | 1228-1255 | SIPCSVCLSGLDSLDTYPSLETIQITI | nsp3(2720-8554) | 1467-1494 |
| | | S | | |
| 2 | 1256-1265 | PRRARSVRYP linker 1-10 | | |
| 2 | 1266-1273 | ISDYDYYR | RNA-dependent_RNA_polymerase | 450-457 |
| | | | (13442-13468 + 13468-16236) | |
| 2 | 1274-1283 | PRRARSVRYP linker 1-10 | | |
| 2 | 1284-1297 | FQTLLALHRSYLTP | surface_glycoprotein(21563-25384) | 238-251 |
| 2 | 1298-1307 | PRRARSVRYP linker 1-10 | | |
| 2 | 1308-1315 | NHTGVVGE | nsp2(806-2719) | 254-261 |
| 2 | 1316-1325 | PRRARSVRYP linker 1-10 | | |
| 2 | 1326-1342 | AAAYYVGYLQPRTFLLK | surface_glycoprotein(21563-25384) | 262-278 |
| 2 | 1343-1352 | PRRARSVRYP linker 1-10 | | |
| 2 | 1353-1360 | STFKCYGV | surface_glycoprotein(21563-25384) | 375-382 |
| 2 | 1364-1370 | PRRARSVRYP linker 1-10 | | |
| 2 | 1371-1385 | FKELLVYAADPAMHA | RNA-dependent_RNA_polymerase | 368-382 |
| | | | (13442-13468 + 13468-16236) | |
| 3 | 1-28 | RLCAYCCNIVNVSLVKPSFYVYSRVKN | envelope_protein(26245-26472) | 38-65 |
| | | L | | |
| 3 | 29-38 | PRRARSVRYP linker 1-10 | | |
| 3 | 39-52 | MPVCVETKAIVSTI | nsp3(2720-8554) | 571-584 |
| 3 | 53-62 | PRRARSVRYP linker 1-10 | | |
| 3 | 63-74 | KTTEVVGDIILK | nsp3(2720-8554) | 1249-1260 |
| 3 | 75-84 | PRRARSVRYP linker 1-10 | | |
| 3 | 85-102 | AFKLNIKLLGVGGKPCIK | nsp6(10973-11842) | 268-285 |
| 3 | 103-112 | PRRARSVRYP linker 1-10 | | |
| 3 | 113-120 | LLLDQALF | nsp3(2720-8554) | 1752-1759 |
| 3 | 121-130 | PRRARSVRYP linker 1-10 | | |
| 3 | 131-150 | ANSIVCRFDTRVLSNLNLPG | 3′-to-5′_exonuclease(18040-19620) | 394-413 |
| 3 | 151-160 | PRRARSVRYP linker 1-10 | | |
| 3 | 161-172 | LKKLKKSLNVAK | nsp8(12092-12685) | 35-46 |
| 3 | 173-182 | PRRARSVRYP linker 1-10 | | |
| 3 | 183-192 | KESVQTFFKL | nsp2(806-2719) | 492-501 |
| 3 | 193-202 | PRRARSVRYP linker 1-10 | | |
| 3 | 203-225 | GEAVKTQFNYYKKVDGVVQQLPE | endoRNAse(19621-20658) | 169-191 |
| 3 | 226-235 | PRRARSVRYP linker 1-10 | | |
| 3 | 236-245 | IGDCATVHTA | 2′-O-ribose_methyltransferase | 112-121 |
| | | | (20659-21552) | |
| 3 | 246-255 | PRRARSVRYP linker 1-10 | | |
| 3 | 256-265 | AQYELKHGTF | nsp3(2720-8554) | 994-1003 |
| 3 | 266-275 | PRRARSVRYP linker 1-10 | | |
| 3 | 276-286 | HNLAKHCLHVV | nsp3(2720-8554) | 290-300 |
| 3 | 287-296 | PRRARSVRYP linker 1-10 | | |
| 3 | 297-333 | GCDVTDVTQLYYLGGMSYYCKSHKPPI | helicase(16237-18039) | 54-90 |
| | | SFPLCANGQVF | | |
| 3 | 334-343 | PRRARSVRYP linker 1-10 | | |
| 3 | 344-370 | NAACRKVQHMVVKAALLADKFPVLHDI | 3′-to-5′_exonuclease(18040-19620) | 306-332 |
| 3 | 371-380 | PRRARSVRYP linker 1-10 | | |
| 3 | 381-391 | VEEVLSEARQH | leader_protein(266-805) | 35-45 |
| 3 | 392-401 | PRRARSVRYP linker 1-10 | | |
| 3 | 402-413 | IEVQGYKSVNIT | nsp3(2720-8554) | 13-24 |
| 3 | 414-423 | PRRARSVRYP linker 1-10 | | |
| 3 | 424-431 | NYQCGHYK | nsp3(2720-8554) | 1012-1019 |
| 3 | 432-441 | PRRARSVRYP linker 1-10 | | |
| 3 | 442-453 | TVNVLAWLYAAV | 3C-like_proteinase(10055-10972) | 201-212 |
| 3 | 454-463 | PRRARSVRYP linker 1-10 | | |
| 3 | 464-479 | SEFSSLPSYAAFATAQ | nsp8(12092-12685) | 4-19 |
| 3 | 480-489 | PRRARSVRYP linker 1-10 | | |
| 3 | 490-511 | LPRVFSAVGNICYTPSKLIEYT | nsp4(8555-10054) | 122-143 |
| 3 | 512-521 | PRRARSVRYP linker 1-10 | | |
| 3 | 522-536 | SVLLSMQGAVDINKL | nsp7(11843-12091) | 57-71 |
| 3 | 537-546 | PRRARSVRYP linker 1-10 | | |
| 3 | 547-560 | CGACIRRPFLCCKC | helicase(16237-18039) | 16-29 |
| 3 | 561-570 | PRRARSVRYP linker 1-10 | | |
| 3 | 571-594 | DPIHSLRVCVDTVRTNVYLAVFDK | nsp3(2720-8554) | 339-362 |
| 3 | 595-604 | PRRARSVRYP linker 1-10 | | |
| 3 | 605-615 | SEAFLIGCNYL | 2′-O-ribose_methyltransferase | 202-212 |
| | | | (20659-21552) | |
| 3 | 616-625 | PRRARSVRYP linker 1-10 | | |
| 3 | 626-641 | DQVILLNKHIDAYKTF | nucleocapsid_phosphoprotein | 348-363 |
| | | | (28274-29533) | |
| 3 | 642-651 | PRRARSVRYP linker 1-10 | | |
| 3 | 652-659 | EHVQIHTI | ORF3a_protein(25393-26220) | 242-249 |
| 3 | 660-669 | PRRARSVRYP linker 1-10 | | |
| 3 | 670-696 | AKYTQLCQYLNTLTLAVPYNMRVIHF | 2′-O-ribose_methyltransferase | 45-71 |
| | | | (20659-21552) | |
| 3 | 697-706 | PRRARSVRYP linker 1-10 | | |
| 3 | 707-726 | GYLPQNAVVKIYCPACHNSE | nsp2(806-2719) | 178-197 |
| 3 | 727-736 | PRRARSVRYP linker 1-10 | | |
| 3 | 737-753 | IVKFISTCACEIVGGQI | nsp2(806-2719) | 468-484 |
| 3 | 754-763 | PRRARSVRYP linker 1-10 | | |
| 3 | 764-775 | VPVVDSYYSLLM | RNA-dependent_RNA_polymerase | 231-242 |
| | | | (13442-13468 + 13468-16236) | |
| 3 | 776-785 | PRRARSVRYP linker 1-10 | | |
| 3 | 786-810 | DDRVILHCANFNVLFSTVFPPTSFG | RNA-dependent_RNA_polymerase | 303-327 |
| | | | (13442-13468 + 13468-16236) | |
| 3 | 811-820 | PRRARSVRYP linker 1-10 | | |
| 3 | 821-846 | QNSVRVLQKAAITILDGISQYSLRLI | nsp2(806-2719) | 376-401 |
| 3 | 847-856 | PRRARSVRYP linker 1-10 | | |
| 3 | 857-876 | VVIKVCEFQFCNDPFLGVYY | surface_glycoprotein(21563-25384) | 126-145 |
| 3 | 877-886 | PRRARSVRYP linker 1-10 | | |
| 3 | 887-897 | IEELFYSYATH | 3′-to-5′_exonuclease(18040-19620) | 363-373 |
| 3 | 898-907 | PRRARSVRYP linker 1-10 | | |
| 3 | 908-939 | VDFCGKGYHLMSFPQSAPHGVVFLHVT | surface_glycoprotein(21563-25384) | 1040-1071 |
| | | YVPAQ | | |
| 3 | 940-949 | PRRARSVRYP linker 1-10 | | |
| 3 | 950-967 | PNFVFPLNSIIKTIQPRV | nsp2(806-2719) | 91-108 |
| 3 | 968-977 | PRRARSVRYP linker 1-10 | | |
| 3 | 978-993 | NDLCFTNVYADSFVIR | surface_glycoprotein(21563-25384) | 388-403 |
| 3 | 994-1003 | PRRARSVRYP linker 1-10 | | |
| 3 | 1004-1012 | VLGSLAATV | nsp9(12686-13024) | 102-110 |
| 3 | 1013-1022 | PRRARSVRYP linker 1-10 | | |
| 3 | 1023-1032 | FEYVSQPFLM | surface_glycoprotein(21563-25384) | 168-177 |
| 3 | 1033-1042 | PRRARSVRYP linker 1-10 | | |
| 3 | 1043-1062 | KGFCDLKGKYVQIPTTCAND | nsp10(13025-13441) | 87-106 |
| 3 | 1063-1072 | PRRARSVRYP linker 1-10 | | |
| 3 | 1073-1092 | INLVRDLPQGFSALEPLVDL | surface_glycoprotein(21563-25384) | 210-229 |
| 3 | 1093-1102 | PRRARSVRYP linker 1-10 | | |
| 3 | 1103-1120 | YADVFHLYLQYIRKLHDE | RNA-dependent_RNA_polymerase | 877-894 |
| | | | (13442-13468 + 13468-16236) | |
| 3 | 1121-1130 | PRRARSVRYP linker 1-10 | | |
| 3 | 1131-1140 | KQYGDCLGDI | surface_glycoprotein(21563-25384) | 835-844 |
| 3 | 1141-1150 | PRRARSVRYP linker 1-10 | | |
| 3 | 1151-1160 | GVITHDVSSA | helicase(16237-18039) | 478-487 |
| 3 | 1161-1170 | PRRARSVRYP linker 1-10 | | |
| 3 | 1171-1180 | GLPVKYLYFI | nsp9(12686-13024) | 82-91 |
| 3 | 1181-1190 | PRRARSVRYP linker 1-10 | | |
| 3 | 1191-1201 | SPDAVTAYNGY | nsp3(2720-8554) | 661-671 |
| 3 | 1202-1211 | PRRARSVRYP linker 1-10 | | |
| 3 | 1212-1225 | ARSVASQSIIAYTM | surface_glycoprotein(21563-25384) | 684-697 |
| 3 | 1226-1235 | PRRARSVRYP linker 1-10 | | |
| 3 | 1236-1246 | VLPFNDGVYFA | surface_glycoprotein(21563-25384) | 83-93 |
| 3 | 1247-1256 | PRRARSVRYP linker 1-10 | | |
| 3 | 1257-1271 | AQSFLNRVCGVSAAR | RNA-dependent_RNA_polymerase | 4-18 |
| | | | (13442-13468 + 13468-16236) | |
| 3 | 1272-1281 | PRRARSVRYP linker 1-10 | | |
| 3 | 1282-1289 | AEVQIDRL | surface_glycoprotein(21563-25384) | 989-996 |
| 3 | 1290-1299 | PRRARSVRYP linker 1-10 | | |
| 3 | 1300-1307 | DLSVVNAR | helicase(16237-18039) | 383-390 |
| 3 | 1308-1317 | PRRARSVRYP linker 1-10 | | |
| 3 | 1318-1334 | FRELGVVHNQDVNLHSS | RNA-dependent_RNA_polymerase | 348-364 |
| | | | (13442-13468 + 13468-16236) | |
| 3 | 1335-1344 | PRRARSVRYP linker 1-10 | | |
| 3 | 1345-1356 | NFRVQPTESIVR | surface_glycoprotein(21563-25384) | 317-328 |
| 3 | 1357-1366 | PRRARSVRYP linker 1-10 | | |
| 3 | 1367-1387 | CSARHINAQVAKSHNIALIWN | nsp3(2720-8554) | 1876-1896 |
| 4 | 1-10 | EQYVFCTVNA | helicase(16237-18039) | 353-362 |
| 4 | 11-20 | PRRARSVRYP linker 1-10 | | |
| 4 | 21-32 | TRAKVGILCIMS | helicase(16237-18039) | 566-577 |
| 4 | 33-42 | PRRARSVRYP linker 1-10 | | |
| 4 | 43-54 | FKLASHMYCSFY | nsp3(2720-8554) | 96-107 |
| 4 | 55-64 | PRRARSVRYP linker 1-10 | | |
| 4 | 65-72 | SRELKVTF | nsp3(2720-8554) | 1134-1141 |
| 4 | 73-82 | PRRARSVRYP linker 1-10 | | |
| 4 | 83-100 | DKACPLIAAVITREVGFV | nsp4(8555-10054) | 85-102 |
| 4 | 101-110 | PRRARSVRYP linker 1-10 | | |
| 4 | 111-120 | LEGSVAYESL | nsp4(8555-10054) | 176-185 |
| 4 | 121-130 | PRRARSVRYP linker 1-10 | | |
| 4 | 131-140 | GTNLPLQLGF | 3′-to-5′_exonuclease(18040-19620) | 102-111 |
| 4 | 141-150 | PRRARSVRYP linker 1-10 | | |
| 4 | 151-158 | ADAVIKTL | nsp3(2720-8554) | 58-65 |
| 4 | 159-168 | PRRARSVRYP linker 1-10 | | |
| 4 | 169-177 | RSVYPVASP | nsp2(806-2719) | 121-129 |
| 4 | 178-187 | PRRARSVRYP linker 1-10 | | |
| 4 | 188-217 | SDIDITFLKKDAPYIVGDVVQEGVLTA | nsp3(2720-8554) | 454-483 |
| | | VVI | | |
| 4 | 218-227 | PRRARSVRYP linker 1-10 | | |
| 4 | 228-238 | TEISFMLWCKD | endoRNAse(19621-20658) | 325-335 |
| 4 | 239-248 | PRRARSVRYP linker 1-10 | | |
| 4 | 249-256 | ARDLSLQF | nsp3(2720-8554) | 1652-1659 |
| 4 | 257-266 | PRRARSVRYP linker 1-10 | | |
| 4 | 267-279 | KLALGGSVAIKIT | 2′-O-ribose_methyltransferase | 160-172 |
| | | | (20659-21552) | |
| 4 | 280-289 | PRRARSVRYP linker 1-10 | | |
| 4 | 290-299 | FDVVRQCSGV | 3C-like_proteinase(10055-10972) | 294-303 |
| 4 | 300-309 | PRRARSVRYP linker 1-10 | | |
| 4 | 310-319 | RHSLSHFVNL | nsp3(2720-8554) | 1697-1706 |
| 4 | 320-329 | PRRARSVRYP linker 1-10 | | |
| 4 | 330-337 | KAVFISPY | helicase(16237-18039) | 508-515 |
| 4 | 338-347 | PRRARSVRYP linker 1-10 | | |
| 4 | 348-368 | LGVLVPHVGEIPVAYRKVLLR | leader_protein(266-805) | 104-124 |
| 4 | 369-378 | PRRARSVRYP linker 1-10 | | |
| 4 | 379-394 | IKPVTYKLDGVVCTEI | nsp3(2720-8554) | 1059-1074 |
| 4 | 395-404 | PRRARSVRYP linker 1-10 | | |
| 4 | 405-412 | SLWVYKQF | 3′-to-5′_exonuclease(18040-19620) | 507-514 |
| 4 | 413-422 | PRRARSVRYP linker 1-10 | | |
| 4 | 423-436 | RLTLGVYDYLVSTQ | nsp6(10973-11842) | 236-249 |
| 4 | 437-446 | PRRARSVRYP linker 1-10 | | |
| 4 | 447-469 | ELYHYQECVRGTTVLLKEPCSSG | ORF7a_protein(27394-27759) | 16-38 |
| 4 | 470-479 | PRRARSVRYP linker 1-10 | | |
| 4 | 480-506 | FSASTSAFVETVKGLDYKAFKQIVESC | nsp2(806-2719) | 300-326 |
| 4 | 507-516 | PRRARSVRYP linker 1-10 | | |
| 4 | 517-546 | CQVHGNAHVASCSAIMTRCLAVHECFV | 3′-to-5′_exonuclease(18040-19620) | 261-290 |
| | | KRV | | |
| 4 | 547-556 | PRRARSVRYP linker 1-10 | | |
| 4 | 557-577 | VKDCVVLHSYFTSDYYQLYST | ORF3a_protein(25393-26220) | 197-217 |
| 4 | 578-587 | PRRARSVRYP linker 1-10 | | |
| 4 | 588-600 | YTELEPPCRFVTD | nsp9(12686-13024) | 66-78 |
| 4 | 601-610 | PRRARSVRYP linker 1-10 | | |
| 4 | 611-631 | QPYRVVVLSFELLHAPATVCG | surface_glycoprotein(21563-25384) | 506-526 |
| 4 | 632-641 | PRRARSVRYP linker 1-10 | | |
| 4 | 642-651 | PRWYFYYLGT | nucleocapsid_phosphoprotein | 106-115 |
| | | | (28274-29533) | |
| 4 | 652-661 | PRRARSVRYP linker 1-10 | | |
| 4 | 662-698 | ALTCFSTQFAFACPDGVKHVYQLRARS | ORF7a_protein(27394-27759) | 55-91 |
| | | VSPKLFIRQE | | |
| 4 | 699-708 | PRRARSVRYP linker 1-10 | | |
| 4 | 709-723 | VEHVTFFIYNKIVDE | ORF3a_protein(25393-26220) | 225-239 |
| 4 | 724-733 | PRRARSVRYP linker 1-10 | | |
| 4 | 734-757 | LGSLVVRCSFYEDFLEYHDVRVVL | ORF8_protein(27894-28259) | 95-118 |
| 4 | 758-767 | PRRARSVRYP linker 1-10 | | |
| 4 | 768-779 | ALGKLQDVVNQN | surface_glycoprotein(21563-25384) | 944-955 |
| 4 | 780-789 | PRRARSVRYP linker 1-10 | | |
| 4 | 790-846 | HFAIGLALYYPSARIVYTACSHAAVDA | helicase(16237-18039) | 290-346 |
| | | LCEKALKYLPIDKCSRIIPARARVECF | | |
| | | DKF | | |
| 4 | 847-856 | PRRARSVRYP linker 1-10 | | |
| 4 | 857-874 | ANSVFNICQAVTANVNAL | RNA-dependent_RNA_polymerase | 690-707 |
| | | | (13442-13468 + 13468-16236) | |
| 4 | 875-884 | PRRARSVRYP linker 1-10 | | |
| 4 | 885-900 | VREVLSDRELHLSWEV | helicase(16237-18039) | 154-169 |
| 4 | 901-910 | PRRARSVRYP linker 1-10 | | |
| 4 | 911-918 | FNSVCRLM | helicase(16237-18039) | 422-429 |
| 4 | 919-928 | PRRARSVRYP linker 1-10 | | |
| 4 | 929-936 | SASKIITL | ORF3a_protein(25393-26220) | 58-65 |
| 4 | 937-946 | PRRARSVRYP linker 1-10 | | |
| 4 | 947-959 | VEGCMVQVTCGTT | 3C-like_proteinase(10055-10972) | 13-25 |
| 4 | 960-969 | PRRARSVRYP linker 1-10 | | |
| 4 | 970-1013 | KSAFVNLKQLPFFYYSDSPCESHGKQV | 3′-to-5′_exonuclease(18040-19620) | 433-476 |
| | | VSDIDYVPLKSATCITR | | |
| 4 | 1014-1023 | PRRARSVRYP linker 1-10 | | |
| 4 | 1024-1038 | EVPANSTVLSFCAFA | nsp10(13025-13441) | 6-20 |
| 4 | 1039-1048 | PRRARSVRYP linker 1-10 | | |
| 4 | 1049-1065 | LTQYNRYLALYNKYKYF | nsp4(8555-10054) | 438-454 |
| 4 | 1066-1075 | PRRARSVRYP linker 1-10 | | |
| 4 | 1076-1083 | NNLVVMAY | nsp2(806-2719) | 413-420 |
| 4 | 1084-1093 | PRRARSVRYP linker 1-10 | | |
| 4 | 1094-1101 | CSCGSCCK | surface_glycoprotein(21563-25384) | 1248-1255 |
| 4 | 1102-1111 | PRRARSVRYP linker 1-10 | | |
| 4 | 1112-1119 | DSYFVVKR | RNA-dependent_RNA_polymerase | 67-74 |
| | | | (13442-13468 + 13468-16236) | |
| 4 | 1120-1129 | PRRARSVRYP linker 1-10 | | |
| 4 | 1130-1139 | RQALLKTVQF | RNA-dependent_RNA_polymerase | 183-192 |
| | | | (13442-13468 + 13468-16236) | |
| 4 | 1140-1149 | PRRARSVRYP linker 1-10 | | |
| 4 | 1150-1160 | AALALLLLDRL | nucleocapsid_phosphoprotein | 217-227 |
| | | | (28274-29533) | |
| 4 | 1161-1170 | PRRARSVRYP linker 1-10 | | |
| 4 | 1171-1180 | SVLNDILSRL | surface_glycoprotein(21563-25384) | 975-984 |
| 4 | 1181-1190 | PRRARSVRYP linker 1-10 | | |
| 4 | 1191-1210 | YLFQHANLDSCKRVLNVVCK | nsp3(2720-8554) | 916-935 |
| 4 | 1211-1220 | PRRARSVRYP linker 1-10 | | |
| 4 | 1221-1233 | GVNLVAVPTGYVD | 3′-to-5′_exonuclease(18040-19620) | 114-126 |
| 4 | 1234-1243 | PRRARSVRYP linker 1-10 | | |
| 4 | 1244-1251 | ISEHDYQI | ORF3a_protein(25393-26220) | 179-186 |
| 4 | 1252-1261 | PRRARSVRYP linker 1-10 | | |
| 4 | 1262-1282 | KSILSPLYAFASEAARVVRSI | nsp2(806-2719) | 347-367 |
| 4 | 1283-1292 | PRRARSVRYP linker 1-10 | | |
| 4 | 1293-1300 | FTGCVIAW | surface_glycoprotein(21563-25384) | 429-436 |
| 4 | 1301-1310 | PRRARSVRYP linker 1-10 | | |
| 4 | 1311-1322 | MPLKAPKEIIFL | nsp2(806-2719) | 551-562 |
| 4 | 1323-1332 | PRRARSVRYP linker 1-10 | | |
| 4 | 1333-1346 | WNVVRIKIVQMLSD | 3′-to-5′_exonuclease(18040-19620) | 159-172 |
| 4 | 1347-1356 | PRRARSVRYP linker 1-10 | | |
| 4 | 1357-1382 | KNPLLYDANYFLCWHTNVYDYCIPYN | ORF3a_protein(25393-26220) | 136-161 |
| 4 | 1383-1392 | PRRARSVRYP linker 1-10 | | |
| 4 | 1393-1408 | LQSLQTYVTQQLIRAA | surface_glycoprotein(21563-25384) | 1001-1016 |

[0086] In certain embodiments, the vaccine comprises or expresses at least one of the contigs concatemers of epitopes from SARS-COV-2 with intervening linker sequences set forth in Table 2 (also see FIG. 13). In certain embodiments, the vaccine comprises or expresses at least two of the concatemers set forth below. In certain embodiments, the vaccine comprises or expresses three of the concatemers set forth below. In certain embodiments, the vaccine comprises or expresses all the concatemers set forth below.

TABLE 2

| concat- | pos_in_ | | | pos_in_ |
|---|---|---|---|---|
| emer | concatemer | epitope | gene | gene |
| 1 | 1-24 | TYASALWEIQQVVDADSKIVQLSE | nsp8(12092-12685) | 148-171 |
| 1 | 25-34 | PRRARSVRYP linker 1-10 | | |
| 1 | 35-44 | FDVVRQCSGV | 3C-like_proteinase(10055-10972) | 294-303 |
| 1 | 45-54 | PRRARSVRYP linker 1-10 | | |
| 1 | 55-62 | LMVVIPDY | nsp8(12092-12685) | 128-135 |
| 1 | 63-72 | PRRARSVRYP linker 1-10 | | |
| 1 | 73-90 | KILNNLGVDIAANTVIWD | endoRNAse(19621-20658) | 70-87 |
| 1 | 91-100 | PRRARSVRYP linker 1-10 | | |
| 1 | 101-111 | TKVDGVDVELF | endoRNAse(19621-20658) | 33-43 |
| 1 | 112-121 | PRRARSVRYP linker 1-10 | | |
| 1 | 122-130 | VLGSLAATV | nsp9(12686-13024) | 102-110 |
| 1 | 131-140 | PRRARSVRYP linker 1-10 | | |
| 1 | 141-148 | CSCGSCCK | surface_glycoprotein(21563-25384) | 1248-1255 |
| 1 | 149-158 | PRRARSVRYP linker 1-10 | | |
| 1 | 159-169 | VLPFNDGVYFA | surface_glycoprotein(21563-25384) | 83-93 |
| 1 | 170-179 | PRRARSVRYP linker 1-10 | | |
| 1 | 180-193 | FFSNVTWFHAIHVS | surface_glycoprotein(21563-25384) | |
| 1 | 194-203 | PRRARSVRYP linker 1-10 | | |
| 1 | 204-211 | SQDLSVVS | endoRNAse(19621-20658) | 308-315 |
| 1 | 212-221 | PRRARSVRYP linker 1-10 | | |
| 1 | 222-232 | SEAFLIGCNYL | 2′-O-ribose_methyltransferase | 202-212 |
| | | | (20659-21552) | |
| 1 | 233-242 | PRRARSVRYP linker 1-10 | | |
| 1 | 243-250 | AEVQIDRL | surface_glycoprotein(21563-25384) | 989-996 |
| 1 | 251-260 | PRRARSVRYP linker 1-10 | | |
| 1 | 261-272 | GSNVFQTRAGCL | surface_glycoprotein(21563-25384) | 639-650 |
| 1 | 273-282 | PRRARSVRYP linker 1-10 | | |
| 1 | 283-310 | IKDLPKEITVATSRTLSYYKLGASQRVA | membrane_glycoprotein(26523-27191) | 161-188 |
| 1 | 311-320 | PRRARSVRYP linker 1-10 | | |
| 1 | 321-328 | TDAVDCAL | surface_glycoprotein(21563-25384) | 286-293 |
| 1 | 329-338 | PRRARSVRYP linker 1-10 | | |
| 1 | 339-350 | FNCYFPLQSYGF | surface_glycoprotein(21563-25384) | 486-497 |
| 1 | 351-360 | PRRARSVRYP linker 1-10 | | |
| 1 | 361-370 | GPKVKYLYFI | nsp9(12686-13024) | 82-91 |
| 1 | 371-380 | PRRARSVRYP linker 1-10 | | |
| 1 | 381-390 | FEYVSQPFLM | surface_glycoprotein(21563-25384) | 168-177 |
| 1 | 391-400 | PRRARSVRYP linker 1-10 | | |
| 1 | 401-416 | LQSLQTYVTQQLIRAA | surface_glycoprotein(21563-25384) | 1001-1016 |
| 1 | 417-426 | PRRARSVRYP linker 1-10 | | |
| 1 | 427-440 | TSACVLAAECTIFK | nsp4(8555-10054) | 147-160 |
| 1 | 441-450 | PRRARSVRYP linker 1-10 | | |
| 1 | 451-458 | TSCCSCLK | surface_glycoprotein(21563-25384) | 1238-1245 |
| 1 | 459-468 | PRRARSVRYP linker 1-10 | | |
| 1 | 469-496 | RLCAYCCNIVNVSLVKPSFYVYSRVKNL | envelope_protein(26245-26472) | 38-65 |
| 1 | 497-506 | PRRARSVRYP linker 1-10 | | |
| 1 | 507-516 | TPLIQPIGAL | nsp4(8555-10054) | 269-278 |
| 1 | 517-526 | PRRARSVRYP linker 1-10 | | |
| 1 | 527-538 | ALGKLQDVVNQN | surface_glycoprotein(21563-25384) | 944-955 |
| 1 | 539-548 | PRRARSVRYP linker 1-10 | | |
| 1 | 549-556 | FTGCVIAW | surface_glycoprotein(21563-25384) | 429-436 |
| 1 | 557-566 | PRRARSVRYP linker 1-10 | | |
| 1 | 567-579 | YTELEPPCRFVTD | nsp9(12686-13024) | 66-78 |
| 1 | 580-589 | PRRARSVRYP linker 1-10 | | |
| 1 | 590-603 | LSPVALRQMSCAAG | nsp9(12686-13024) | 4-17 |
| 1 | 604-613 | PRRARSVRYP linker 1-10 | | |
| 1 | 614-622 | IQLSSYSLF | 2′-O-ribose_methyltransferase | 237-245 |
| | | | (20659-21552) | |
| 2 | 1-10 | EGSVRVVTTF | nsp4(8555-10054) | 207-216 |
| 2 | 11-20 | PRRARSVRYP linker 1-10 | | |
| 2 | 21-36 | SEFSSLPSYAAFATAQ | nsp8(12092-12685) | 4-19 |
| 2 | 37-46 | PRRARSVRYP linker 1-10 | | |
| 2 | 47-54 | VAFNVVNK | endoRNAse(19621-20658) | 5-12 |
| 2 | 55-64 | PRRARSVRYP linker 1-10 | | |
| 2 | 65-85 | LGVLVPHVGEIPVAYRKVLLR | leader_protein(266-805) | 104-124 |
| 2 | 86-95 | PRRARSVRYP linker 1-10 | | |
| 2 | 96-105 | ARDLICAQKF | surface_glycoprotein(21563-25384) | 846-855 |
| 2 | 106-115 | PRRARSVRYP linker 1-10 | | |
| 2 | 116-127 | LNVPLHGTILTR | membrane_glycoprotein(26523-27191) | 120-131 |
| 2 | 128-137 | PRRARSVRYP linker 1-10 | | |
| 2 | 138-147 | SVLNDILSRL | surface_glycoprotein(21563-25384) | 975-984 |
| 2 | 148-157 | PRRARSVRYP linker 1-10 | | |
| 2 | 158-168 | AALALLLLDRL | nucleocapsid_phosphoprotein | 217-227 |
| | | | (28274-29533) | |
| 2 | 169-178 | PRRARSVRYP linker 1-10 | | |
| 2 | 179-186 | EVTPSGTW | nucleocapsid_phosphoprotein | 323-330 |
| | | | (28274-29533) | |
| 2 | 187-196 | PRRARSVRYP linker 1-10 | | |
| 2 | 197-204 | AALQIPFA | surface_glycoprotein(21563-25384) | 892-899 |
| 2 | 205-214 | PRRARSVRYP linker 1-10 | | |
| 2 | 215-232 | YQDVNCTEVPVAIHADQL | surface_glycoprotein(21563-25384) | 612-629 |
| 2 | 233-242 | PRRARSVRYP linker 1-10 | | |
| 2 | 243-252 | KQYGDCLGDI | surface_glycoprotein(21563-25384) | 835-844 |
| 2 | 253-262 | PRRARSVRYP linker 1-10 | | |
| 2 | 263-275 | QCVQLHNDILLAK | nsp7(11843-12091) | 31-43 |
| 2 | 276-285 | PRRARSVRYP linker 1-10 | | |
| 2 | 286-295 | LAWPLIVTAL | nsp8(12092-12685) | 180-189 |
| 2 | 296-305 | PRRARSVRYP linker 1-10 | | |
| 2 | 306-323 | HVQLSLPVLQVRDVLVRG | leader_protein(266-805) | 13-30 |
| 2 | 324-333 | PRRARSVRYP linker 1-10 | | |
| 2 | 334-349 | LVDFQVTIAEILLIIM | ORF6_protein(27202-27387) | 4-19 |
| 2 | 350-359 | PRRARSVRYP linker 1-10 | | |
| 2 | 360-367 | SLIDLQEL | surface_glycoprotein(21563-25384) | 1196-1203 |
| 2 | 368-377 | PRRARSVRYP linker 1-10 | | |
| 2 | 378-409 | VDFCGKGYHLMSFPQSAPHGVVFLHVTY | surface_glycoprotein(21563-25384) | 1040-1071 |
| | | VPAQ | | |
| 2 | 410-419 | PRRARSVRYP linker 1-10 | | |
| 2 | 420-429 | LEGSVAYESL | nsp4(8555-10054) | 176-185 |
| 2 | 430-439 | PRRARSVRYP linker 1-10 | | |
| 2 | 440-466 | AKYTQLCQYLNTLTLAVPYNMRVIHFG | 2′-O-ribose_methyltransferase | 45-71 |
| | | | (20659-21552) | |
| 2 | 467-476 | PRRARSVRYP linker 1-10 | | |
| 2 | 477-513 | ALTCFSTQFAFACPDGVKHVYQLRARSV | ORF7a_protein(27394-27759) | 55-91 |
| | | SPKLFIRQE | | |
| 2 | 514-523 | PRRARSVRYP linker 1-10 | | |
| 2 | 524-534 | ITNCVKMLCTH | nsp10(13025-13441) | 38-48 |
| 2 | 535-544 | PRRARSVRYP linker 1-10 | | |
| 2 | 545-557 | YTVSCLPFTINCQ | ORF8_protein(27894-28259) | 79-91 |
| 2 | 558-567 | PRRARSVRYP linker 1-10 | | |
| 2 | 568-591 | LGSLVVRCSFYEDFLEYHDVRVVL | ORF8_protein(27894-28259) | 95-118 |
| 2 | 592-601 | PRRARSVRYP linker 1-10 | | |
| 2 | 602-614 | KLALGGSVAIKIT | 2′-O-ribose_methyltransferase | 160-172 |
| | | | (20659-21552) | |
| 2 | 615-624 | PRRARSVRYP linker 1-10 | | |
| 2 | 625-636 | LKKLKKSLNVAK | nsp8(12092-12685) | 35-46 |
| 3 | 1-15 | SVLLSMQGAVDINKL | nsp7(11843-12091) | 57-71 |
| 3 | 16-25 | PRRARSVRYP linker 1-10 | | |
| 3 | 26-58 | YEPLTQDHVDILGPLSAQTGIAVLDMCA | 3C-like_proteinase(10055-10972) | 239-271 |
| | | SLKEI | | |
| 3 | 59-68 | PRRARSVRYP linker 1-10 | | |
| 3 | 69-84 | NDLCFTNVYADSFVIR | surface_glycoprotein(21563-25384) | 388-403 |
| 3 | 85-94 | PRRARSVRYP linker 1-10 | | |
| 3 | 95-110 | DQVILLNKHIDAYKTF | nucleocapsid_phosphoprotein | 348-363 |
| | | | (28274-29533) | |
| 3 | 111-120 | PRRARSVRYP linker 1-10 | | |
| 3 | 121-132 | EVFAQVKQIYKT | surface_glycoprotein(21563-25384) | 780-791 |
| 3 | 133-142 | PRRARSVRYP linker 1-10 | | |
| 3 | 143-162 | VVIKVCEFQFCNDPFLGVYY | surface_glycoprotein(21563-25384) | 126-145 |
| 3 | 163-172 | PRRARSVRYP linker 1-10 | | |
| 3 | 173-187 | EILDITPCSFGGVSV | surface_glycoprotein(21563-25384) | 583-597 |
| 3 | 188-197 | PRRARSVRYP linker 1-10 | | |
| 3 | 198-207 | IGDCATVHTA | 2′-O-ribose_methyltransferase | 112-121 |
| | | | (20659-21552) | |
| 3 | 208-217 | PRRARSVRYP linker 1-10 | | |
| 3 | 218-232 | SDVLYQPPQTSITSA | nsp4(8555-10054) | 483-497 |
| 3 | 233-242 | PRRARSVRYP linker 1-10 | | |
| 3 | 243-250 | YLKLRSDV | nsp4(8555-10054) | 427-434 |
| 3 | 251-260 | PRRARSVRYP linker 1-10 | | |
| 3 | 261-274 | DYDCVSFCYMHHME | 3C-like_proteinase(10055-10972) | 153-166 |
| 3 | 275-284 | PRRARSVRYP linker 1-10 | | |
| 3 | 285-292 | GYVMHANY | 2′-O-ribose_methyltransferase | 221-228 |
| | | | (20659-21552) | |
| 3 | 293-302 | PRRARSVRYP linker 1-10 | | |
| 3 | 303-312 | GEVPVSIINN | endoRNAse(19621-20658) | 20-29 |
| 3 | 313-322 | PRRARSVRYP linker 1-10 | | |
| 3 | 323-345 | TFKVSIWNLDYIINLIIKNLSKS | ORF6_protein(27202-27387) | 21-43 |
| 3 | 346-355 | PRRARSVRYP linker 1-10 | | |
| 3 | 356-392 | FHQECSLQSCTQHQPYVVDDPCPIHFYS | ORF8_protein(27894-28259) | 16-52 |
| | | KWYIRVGAR | | |
| 3 | 393-402 | PRRARSVRYP linker 1-10 | | |
| 3 | 403-413 | ETICAPLTVFF | endoRNAse(19621-20658) | 113-123 |
| 3 | 414-423 | PRRARSVRYP linker 1-10 | | |
| 3 | 424-439 | NFLVQAGNVQLRVIGH | 3C-like_proteinase(10055-10972) | 65-80 |
| 3 | 440-449 | PRRARSVRYP linker 1-10 | | |
| 3 | 450-466 | LTQYNRYLALYNKYKYF | nsp4(8555-10054) | 438-454 |
| 3 | 467-476 | PRRARSVRYP linker 1-10 | | |
| 3 | 477-498 | LPRVFSAVGNICYTPSKLIEYT | nsp4(8555-10054) | 122-143 |
| 3 | 499-508 | PRRARSVRYP linker 1-10 | | |
| 3 | 509-520 | NFRVQPTESIVR | surface_glycoprotein(21563-25384) | 317-328 |
| 3 | 521-530 | PRRARSVRYP linker 1-10 | | |
| 3 | 531-545 | EVPANSTVLSFCAFA | nsp10(13025-13441) | 6-20 |
| 3 | 546-555 | PRRARSVRYP linker 1-10 | | |
| 3 | 556-569 | FQTLLALHRSYLTP | surface_glycoprotein(21563-25384) | 238-251 |
| 3 | 570-579 | PRRARSVRYP linker 1-10 | | |
| 3 | 580-596 | AAAYYVGYLQPRTFLLK | surface_glycoprotein(21563-25384) | 262-278 |
| 3 | 597-606 | PRRARSVRYP linker 1-10 | | |
| 3 | 607-616 | PRWYFYYLGT | nucleocapsid_phosphoprotein | 106-115 |
| | | | (28274-29533) | |
| 3 | 617-626 | PRRARSVRYP linker 1-10 | | |
| 3 | 627-640 | RLTLGVYDYLVSTQ | nsp6(10973-11842) | 236-249 |
| 4 | 1-14 | ARSVASQSIIAYTM | surface_glycoprotein(21563-25384) | 684-697 |
| 4 | 15-24 | PRRARSVRYP linker 1-10 | | |
| 4 | 25-35 | TEISFMLWCKD | endoRNAse(19621-20658) | 325-335 |
| 4 | 36-45 | PRRARSVRYP linker 1-10 | | |
| 4 | 46-66 | QPYRVVVLSFELLHAPATVCG | surface_glycoprotein(21563-25384) | 506-526 |
| 4 | 67-76 | PRRARSVRYP linker 1-10 | | |
| 4 | 77-99 | GEAVKTQFNYYKKVDGVVQQLPE | endoRNAse(19621-20658) | 169-191 |
| 4 | 100-109 | PRRARSVRYP linker 1-10 | | |
| 4 | 110-126 | KHWPQIAQFAPSASAFF | nucleocapsid_phosphoprotein | 299-315 |
| | | | (28274-29533) | |
| 4 | 127-136 | PRRARSVRYP linker 1-10 | | |
| 4 | 137-144 | TFSVLACY | 3C-like_proteinase(10055-10972) | 111-118 |
| 4 | 145-154 | PRRARSVRYP linker 1-10 | | |
| 4 | 155-162 | EHIVYGDF | endoRNAse(19621-20658) | 233-240 |
| 4 | 163-172 | PRRARSVRYP linker 1-10 | | |
| 4 | 173-181 | KFPLKLRGT | 2′-O-ribose_methyltransferase | 249-257 |
| | | | (20659-21552) | |
| 4 | 182-191 | PRRARSVRYP linker 1-10 | | |
| 4 | 192-199 | STFKCYGV | surface_glycoprotein(21563-25384) | 375-382 |
| 4 | 200-209 | PRRARSVRYP linker 1-10 | | |
| 4 | 210-219 | LQYGSFCTQL | surface_glycoprotein(21563-25384) | 754-763 |
| 4 | 220-229 | PRRARSVRYP linker 1-10 | | |
| 4 | 230-240 | CTLKSFTVEKG | surface_glycoprotein(21563-25384) | 301-311 |
| 4 | 241-250 | PRRARSVRYP linker 1-10 | | |
| 4 | 251-261 | VEEVLSEARQH | leader_protein(266-805) | 35-45 |
| 4 | 262-271 | PRRARSVRYP linker 1-10 | | |
| 4 | 272-289 | AFKLNIKLLGVGGKPCIK | nsp6(10973-11842) | 268-285 |
| 4 | 290-299 | PRRARSVRYP linker 1-10 | | |
| 4 | 300-313 | DGCVPLNIIPLTTA | nsp8(12092-12685) | 112-125 |
| 4 | 314-323 | PRRARSVRYP linker 1-10 | | |
| 4 | 324-336 | VEGCMVQVTCGTT | 3C-like_proteinase(10055-10972) | 13-25 |
| 4 | 337-346 | PRRARSVRYP linker 1-10 | | |
| 4 | 347-366 | KGFCDLKGKYVQIPTTCAND | nsp10(13025-13441) | 87-106 |
| 4 | 367-376 | PRRARSVRYP linker 1-10 | | |
| 4 | 377-396 | INLVRDLPQGFSALEPLVDL | surface_glycoprotein(21563-25384) | 210-229 |
| 4 | 397-406 | PRRARSVRYP linker 1-10 | | |
| 4 | 407-416 | CPRHVICTSE | 3C-like_proteinase(10055-10972) | 38-47 |
| 4 | 417-426 | PRRARSVRYP linker 1-10 | | |
| 4 | 427-444 | DKACPLIAAVITREVGFV | nsp4(8555-10054) | 85-102 |
| 4 | 445-454 | PRRARSVRYP linker 1-10 | | |
| 4 | 455-466 | TVNVLAWLYAAV | 3C-like_proteinase(10055-10972) | 201-212 |
| 4 | 467-476 | PRRARSVRYP linker 1-10 | | |
| 4 | 477-500 | SELVIGAVILRGHLRIAGHHLGRC | membrane_glycoprotein(26523-27191) | 136-159 |
| 4 | 501-510 | PRRARSVRYP linker 1-10 | | |
| 4 | 511-533 | ELYHYQECVRGTTVLLKEPCSSG | ORF7a_protein(27394-27759) | 16-38 |
| 4 | 534-543 | PRRARSVRYP linker 1-10 | | |
| 4 | 544-553 | TLPVNVAFEL | endoRNAse(19621-20658) | 48-57 |
| 4 | 554-563 | PRRARSVRYP linker 1-10 | | |
| 4 | 564-575 | ISVTTEILPVSM | surface_glycoprotein(21563-25384) | 720-731 |
| 4 | 576-585 | PRRARSVRYP linker 1-10 | | |
| 4 | 586-596 | ASCCLYCRCHI | nsp10(13025-13441) | 71-81 |
| 4 | 597-606 | PRRARSVRYP linker 1-10 | | |
| 4 | 607-621 | ISNCVADYSVLYNSA | surface_glycoprotein(21563-25384) | 358-372 |

[0087] In certain embodiments, the vaccine comprises or expresses at least one of the concatemers of epitopes from SARS-COV-2 with intervening linker sequences. In certain embodiments, the vaccine comprises or expresses at least two of the concatemers set forth below. In certain embodiments, the vaccine comprises or expresses three of the concatemer set forth below. In certain embodiments, the vaccine comprises or expresses all the concatemers set forth below.

TABLE 3

| concat- | pos_in_ | | | pos_in_ |
|---|---|---|---|---|
| emer | concatemer | epitope | gene | gene |
| 1 | 1-24 | TYASALWEIQQVVDADSKIVQLSE | nsp8(12092-12685) | 148-171 |
| 1 | 25-34 | PRRARSVRYP linker 1-10 | | |
| 1 | 35-47 | QCVQLHNDILLAK | nsp7(11843-12091) | 31-43 |
| 1 | 48-57 | PRRARSVRYP linker 1-10 | | |
| 1 | 58-70 | VEGCMVQVTCGTT | 3C-like_proteinase(10055-10972) | 13-25 |
| 1 | 71-80 | PRRARSVRYP linker 1-10 | | |
| 1 | 81-97 | LTQYNRYLALYNKYKYF | nsp4(8555-10054) | 438-454 |
| 1 | 98-107 | PRRARSVRYP linker 1-10 | | |
| 1 | 108-117 | TPLIQPIGAL | nsp4(8555-10054) | 269-278 |
| 1 | 118-127 | PRRARSVRYP linker 1-10 | | |
| 1 | 128-135 | LMVVIPDY | nsp8(12092-12685) | 128-135 |
| 1 | 136-145 | PRRARSVRYP linker 1-10 | | |
| 1 | 146-155 | TLPVNVAFEL | endoRNAse(19621-20658) | 48-57 |
| 1 | 156-165 | PRRARSVRYP linker 1-10 | | |
| 1 | 166-181 | DQVILLNKHIDAYKTF | nucleocapsid_phosphoprotein | 348-363 |
| | | | (28274-29533) | |
| 1 | 182-191 | PRRARSVRYP linker 1-10 | | |
| 1 | 192-203 | LKKLKKSLNVAK | nsp8(12092-12685) | 35-46 |
| 1 | 204-213 | PRRARSVRYP linker 1-10 | | |
| 1 | 214-221 | EHIVYGDF | endoRNAse(19621-20658) | 233-240 |
| 1 | 222-231 | PRRARSVRYP linker 1-10 | | |
| 1 | 232-242 | VEEVLSEARQH | leader_protein(266-805) | 35-45 |
| 1 | 243-252 | PRRARSVRYP linker 1-10 | | |
| 1 | 253-266 | DGCVPLNIIPLTTA | nsp8(12092-12685) | 112-125 |
| 1 | 267-276 | PRRARSVRYP linker 1-10 | | |
| 1 | 277-299 | ELYHYQECVRGTTVLLKEPCSSG | ORF7a_protein(27394-27759) | 16-38 |
| 1 | 300-309 | PRRARSVRYP linker 1-10 | | |
| 1 | 310-319 | PRWYFYYLGT | nucleocapsid_phosphoprotein | 106-115 |
| | | | (28274-29533) | |
| 1 | 320-329 | PRRARSVRYP linker 1-10 | | |
| 1 | 330-344 | SDVLYQPPQTSITSA | nsp4(8555-10054) | 483-497 |
| 1 | 345-354 | PRRARSVRYP linker 1-10 | | |
| 1 | 355-378 | SELVIGAVILRGHLRIAGHHLGRC | membrane_glycoprotein(26523-27191) | 136-159 |
| 1 | 379-388 | PRRARSVRYP linker 1-10 | | |
| 1 | 389-408 | KGFCDLKGKYVQIPTTCAND | nsp10(13025-13441) | 87-106 |
| 1 | 409-418 | PRRARSVRYP linker 1-10 | | |
| 1 | 419-436 | AFKLNIKLLGVGGKPCIK | nsp6(10973-11842) | 268-285 |
| 2 | 1-10 | EGSVRVVTTF | nsp4(8555-10054) | 207-216 |
| 2 | 11-20 | PRRARSVRYP linker 1-10 | | |
| 2 | 21-29 | KFPLKLRGT | 2′-O-ribose_methyltransferase | 249-257 |
| | | | (20659-21552) | |
| 2 | 30-39 | PRRARSVRYP linker 1-10 | | |
| 2 | 40-49 | CPRHVICTSE | 3C-like_proteinase(10055-10972) | 38-47 |
| 2 | 50-59 | PRRARSVRYP linker 1-10 | | |
| 2 | 60-77 | DKACPLIAAVITREVGFV | nsp4(8555-10054) | 85-102 |
| 2 | 78-87 | PRRARSVRYP linker 1-10 | | |
| 2 | 88-101 | DYDCVSFCYMHHME | 3C-like_proteinase(10055-10972) | 153-166 |
| 2 | 102-111 | PRRARSVRYP linker 1-10 | | |
| 2 | 112-127 | NFLVQAGNVQLRVIGH | 3C-like_proteinase(10055-10972) | 65-80 |
| 2 | 128-137 | PRRARSVRYP linker 1-10 | | |
| 2 | 138-146 | IQLSSYSLF | 2′-O-ribose_methyltransferase | 237-245 |
| | | | (20659-21552) | |
| 2 | 147-156 | PRRARSVRYP linker 1-10 | | |
| 2 | 157-169 | KLALGGSVAIKIT | 2′-O-ribose_methyltransferase | 160-172 |
| 2 | 170-179 | PRRARSVRYP linker 1-10 | (20659-21552) | |
| 2 | 180-197 | KILNNLGVDIAANTVIWD | endoRNAse(19621-20658) | 70-87 |
| 2 | 198-207 | PRRARSVRYP linker 1-10 | | |
| 2 | 208-235 | IKDLPKEITVATSRTLSYYKLGASQRVA | membrane_glycoprotein(26523-27191) | 161-188 |
| 2 | 236-245 | PRRARSVRYP linker 1-10 | | |
| 2 | 246-266 | LGVLVPHVGEIPVAYRKVLLR | leader_protein(266-805) | 104-124 |
| 2 | 267-276 | PRRARSVRYP linker 1-10 | | |
| 2 | 277-286 | GEVPVSIINN | endoRNAse(19621-20658) | 20-29 |
| 2 | 287-296 | PRRARSVRYP linker 1-10 | | |
| 2 | 297-306 | LAWPLIVTAL | nsp8(12092-12685) | 180-189 |
| 2 | 307-316 | PRRARSVRYP linker 1-10 | | |
| 2 | 317-328 | LNVPLHGTILTR | membrane_glycoprotein(26523-27191) | 120-131 |
| 2 | 329-338 | PRRARSVRYP linker 1-10 | | |
| 2 | 339-346 | EVTPSGTW | nucleocapsid_phosphoprotein | 323-330 |
| | | | (28274-29533) | |
| 2 | 347-356 | PRRARSVRYP linker 1-10 | | |
| 2 | 357-371 | EVPANSTVLSFCAFA | nsp10(13025-13441) | 6-20 |
| 2 | 372-381 | PRRARSVRYP linker 1-10 | | |
| 2 | 382-389 | VAFNVVNK | endoRNAse(19621-20658) | 5-12 |
| 2 | 390-399 | PRRARSVRYP linker 1-10 | | |
| 2 | 400-422 | GEAVKTQFNYYKKVDGVVQQLPE | endoRNAse(19621-20658) | 169-191 |
| 2 | 423-432 | PRRARSVRYP linker 1-10 | | |
| 2 | 433-443 | ASCCLYCRCHI | nsp10(13025-13441) | 71-81 |
| 3 | 1-15 | SVLLSMQGAVDINKL | nsp7(11843-12091) 57-71 | 57-71 |
| 3 | 16-25 | PRRARSVRYP linker 1-10 | | |
| 3 | 26-38 | YTELEPPCRFVTD | nsp9(12686-13024) | 66-78 |
| 3 | 39-48 | PRRARSVRYP linker 1-10 | | |
| 3 | 49-62 | RLTLGVYDYLVSTQ | nsp6(10973-11842) | 236-249 |
| 3 | 63-72 | PRRARSVRYP linker 1-10 | | |
| 3 | 73-86 | LSPVALRQMSCAAG | nsp9(12686-13024) | 4-17 |
| 3 | 87-96 | PRRARSVRYP linker 1-10 | | |
| 3 | 97-107 | TEISFMLWCKD | endoRNAse(19621-20658) | 325-335 |
| 3 | 108-117 | PRRARSVRYP linker 1-10 | | |
| 3 | 118-129 | TVNVLAWLYAAV | 3C-like_proteinase(10055-10972) | 201-212 |
| 3 | 130-139 | PRRARSVRYP linker 1-10 | | |
| 3 | 140-157 | HVQLSLPVLQVRDVLVRG | leader_protein(266-805) | 13-30 |
| 3 | 158-167 | PRRARSVRYP linker 1-10 | | |
| 3 | 168-180 | YTVSCLPFTINCQ | ORF8_protein(27894-28259) | 79-91 |
| 3 | 181-190 | PRRARSVRYP linker 1-10 | | |
| 3 | 191-198 | GYVMHANY | 2′-O-ribose_methyltransferase | 221-228 |
| | | | (20659-21552) | |
| 3 | 199-208 | PRRARSVRYP linker 1-10 | | |
| 3 | 209-232 | LGSLVVRCSFYEDFLEYHDVRVVL | ORF8_protein(27894-28259) | 95-118 |
| 3 | 233-242 | PRRARSVRYP linker 1-10 | | |
| 3 | 243-253 | AALALLLLDRL | nucleocapsid_phosphoprotein | 217-227 |
| | | | (28274-29533) | |
| 3 | 254-263 | PRRARSVRYP linker 1-10 | | |
| 3 | 264-271 | YLKLRSDV | nsp4(8555-10054) | 427-434 |
| 3 | 272-281 | PRRARSVRYP linker 1-10 | | |
| 3 | 282-292 | ITNCVKMLCTH | nsp10(13025-13441) | 38-48 |
| 3 | 293-302 | PRRARSVRYP linker 1-10 | | |
| 3 | 303-316 | TSACVLAAECTIFK | nsp4(8555-10054) 147-160 | 147-160 |
| 3 | 317-326 | PRRARSVRYP linker 1-10 | | |
| 3 | 327-335 | VLGSLAATV | nsp9(12686-13024) | 102-110 |
| 3 | 336-345 | PRRARSVRYP linker 1-10 | | |
| 3 | 346-353 | TFSVLACY | 3C-like_proteinase(10055-10972) | 111-118 |
| 3 | 354-363 | PRRARSVRYP linker 1-10 | | |
| 3 | 364-400 | ALTCFSTQFAFACPDGVKHVYQLRARSV | ORF7a_protein(27394-27759) | 55-91 |
| | | SPKLFIRQE | | |
| 3 | 401-410 | PRRARSVRYP linker 1-10 | | |
| 3 | 411-427 | KHWPQIAQFAPSASAFF | nucleocapsid_phosphoprotein | 299-315 |
| | | | (28274-29533) | |
| 4 | 1-10 | FDVVRQCSGV | 3C-like_proteinase(10055-10972) | 294-303 |
| 4 | 11-20 | PRRARSVRYP linker 1-10 | | |
| 4 | 21-47 | AKYTQLCQYLNTLTLAVPYNMRVIHFG | 2′-O-ribose_methyltransferase | 45-71 |
| | | | (20659-21552) | |
| 4 | 48-57 | PRRARSVRYP linker 1-10 | | |
| 4 | 58-67 | LEGSVAYESL | nsp4(8555-10054) | 176-185 |
| 4 | 68-77 | PRRARSVRYP linker 1-10 | | |
| 4 | 78-85 | SQDLSVVS | endoRNAse(19621-20658) | 308-315 |
| 4 | 86-95 | PRRARSVRYP linker 1-10 | | |
| 4 | 96-118 | TFKVSIWNLDYIINLIIKNLSKS | ORF6_protein(27202-27387) | 21-43 |
| 4 | 119-128 | PRRARSVRYP linker 1-10 | | |
| 4 | 129-139 | ETICAPLTVFF | endoRNAse(19621-20658) | 113-123 |
| 4 | 140-149 | PRRARSVRYP linker 1-10 | | |
| 4 | 150-186 | FHQECSLQSCTQHQPYVVDDPCPIHFYS | ORF8_protein(27894-28259) | 16-52 |
| | | KWYIRVGAR | | |
| 4 | 187-196 | PRRARSVRYP linker 1-10 | | |
| 4 | 197-206 | IGDCATVHTA | 2′-O-ribose_methyltransferase | 112-121 |
| | | | (20659-21552) | |
| 4 | 207-216 | PRRARSVRYP linker 1-10 | | |
| 4 | 217-227 | SEAFLIGCNYL | 2′-O-ribose_methyltransferase | 202-212 |
| | | | (20659-21552) | |
| 4 | 228-237 | PRRARSVRYP linker 1-10 | | |
| 4 | 238-253 | LVDFQVTIAEILLIIM | ORF6_protein(27202-27387) | 4-19 |
| 4 | 254-263 | PRRARSVRYP linker 1-10 | | |
| 4 | 264-274 | TKVDGVDVELF | endoRNAse(19621-20658) | 33-43 |
| 4 | 275-284 | PRRARSVRYP linker 1-10 | | |
| 4 | 285-317 | YEPLTQDHVDILGPLSAQTGIAVLDMCA | 3C-like_proteinase(10055-10972) | 239-271 |
| | | SLKEL | | |
| 4 | 318-327 | PRRARSVRYP linker 1-10 | | |
| 4 | 328-349 | LPRVFSAVGNICYTPSKLIEYT | nsp4(8555-10054) | 122-143 |
| 4 | 350-359 | PRRARSVRYP linker 1-10 | | |
| 4 | 360-375 | SEFSSLPSYAAFATAQ | nsp8(12092-12685) | 4-19 |
| 4 | 376-385 | PRRARSVRYP linker 1-10 | | |
| 4 | 386-395 | GPKVKYLYFI | nsp9(12686-13024) | 82-91 |
| 4 | 396-405 | PRRARSVRYP linker 1-10 | | |
| 4 | 406-433 | RLCAYCCNIVNVSLVKPSFYVYSRVKNL | envelope_protein(26245-26472) | 38-65 |

[0088] Depending on the actual embodiment, the number of concatemers can be different. Depending on the actual embodiment, the sequence of the linker can be different. Depending on the actual embodiment, the concatemers can include epitopes derived from viral strains circulating in a specific geographical region or otherwise defined (it should be noted that the country names listed in the following sequences are actually placeholders for viral peptides circulating in more than one country).

[0089] In certain embodiments, the vaccine comprises or expresses at least one of the concatemers of epitopes from SARS-COV-2 with intervening linker sequences (and as set forth in FIG. 14). In certain embodiments, the vaccine comprises or expresses at least two of the concatemers set forth below. In certain embodiments, the vaccine comprises or expresses three of the concatemers set forth below. In certain embodiments, the vaccine comprises or expresses four of the concatemers set forth below. In certain embodiments, the vaccine comprises or expresses five of the concatemers set forth below. In certain embodiments, the vaccine comprises or expresses all the concatemers set forth below.

TABLE 4

| concat- | pos_in_ | | | pos_in_ |
|---|---|---|---|---|
| emer | concatemer | epitope | gene | gene |
| 1 | 1-11 | GPKVKYLYFIK | nsp9(NC_045512: + : 12686-13024) | 82-92 |
| 1 | 12-16 | ATLQA linker 1-5 | | |
| 1 | 17-39 | TQLYLGGMSYYCKPHKPPISFPL | helicase@Iceland(NC_045512@Iceland: | 61-83 |
| | | | + : 16237-18039) | |
| 1 | 40-44 | ATLQA linker 1-5 | | |
| 1 | 45-68 | PINLVRDLPQGFSVLEPLVDLPIG | surface_glycoprotein@Belgium | 205-228 |
| | | | (NC_045512@Belgium: + : | |
| | | | 21563-25384) | |
| 1 | 69-73 | ATLQA linker 1-5 | | |
| 1 | 74-89 | NYTVSCLPFTINCQEP | ORF8_protein@Bangladesh(NC_045512@ | 78-93 |
| | | | Bangladesh: + : 27894-28259) | |
| 1 | 90-94 | ATLQA linker 1-5 | | |
| 1 | 95-109 | VNCTEVPVAIHADQL | surface_glycoprotein(NC_045512: + : | 615-629 |
| | | | 21563-25384) | |
| 1 | 110-114 | ATLQA linker 1-5 | | |
| 1 | 115-128 | TDTVVEHVTFFIYN | ORF3a_protein@CostaRica(NC_045512@ | 221-234 |
| | | | CostaRica: + : 25393-26220) | |
| 1 | 129-133 | ATLQA linker 1-5 | | |
| 1 | 134-153 | RLCAYCCNIVNVSLVKPSFY | envelope_protein(NC_045512: + : | 38-57 |
| | | | 26245-26472) | |
| 1 | 154-158 | ATLQA linker 1-5 | | |
| 1 | 159-173 | VEHVTFFIYNKIVDE | ORF3a_protein(NC_045512: + : | 225-239 |
| | | | 25393-26220) | |
| 1 | 174-178 | ATLQA linker 1-5 | | |
| 1 | 179-187 | VLGSLAATV | nsp9(NC_045512: + : 12686-13024) | 102-110 |
| 1 | 188-192 | ATLQA linker 1-5 | | |
| 1 | 193-202 | KACVEEVTTT | nsp3(NC_045512: + : 2720-8554) | 415-424 |
| 1 | 203-207 | ATLQA linker 1-5 | | |
| 1 | 208-215 | PEHSLAEY | nsp2(NC_045512: + : 806-2719) | 200-207 |
| 1 | 216-220 | ATLQA linker 1-5 | | |
| 1 | 221-233 | IVKFISTCACEIV | nsp2(NC_045512: + : 806-2719) | 468-480 |
| 1 | 234-238 | ATLQA linker 1-5 | | |
| 1 | 239-257 | LEILDITPCSFGGVSVITP | surface_glycoprotein(NC_045512: + : | 582-600 |
| | | | 21563-25384) | |
| 1 | 258-262 | ATLQA linker 1-5 | | |
| 1 | 263-278 | VREVLSDRELHLSWEV | helicase(NC_045512: + : | 154-169 |
| | | | 16237-18039) | |
| 1 | 279-283 | ATLQA linker 1-5 | | |
| 1 | 284-308 | KNPLLYDANYFLCWHTNCYDYCIPY | ORF3a_protein@Aruba(NC_045512@ | 136-160 |
| | | | Aruba: + : 25393-26220) | |
| 1 | 309-313 | ATLQA linker 1-5 | | |
| 1 | 314-326 | AFASEAARVVRSI | nsp2(NC_045512: + : 806-2719) | 355-367 |
| 1 | 327-331 | ATLQA linker 1-5 | | |
| 1 | 332-339 | VQLRVIGH | 3C-like_proteinase(NC_045512: + : | 73-80 |
| | | | 10055-10972) | |
| 1 | 340-344 | ATLQA linker 1-5 | | |
| 1 | 345-368 | TTTVAAFHQECSLQLCTQHQPYVVD | ORF8_protein@USA(NC_045512@USA: + : | 11-34 |
| | | | 27894-28259) | |
| 1 | 369-373 | ATLQA linker 1-5 | | |
| 1 | 374-385 | YPSLETIQITIS | nsp3(NC_045512: + : 2720-8554) | 582-600 |
| 1 | 386-390 | ATLQA linker 1-5 | | |
| 1 | 391-400 | FCLEASFNYL | nsp3(NC_045512: + : 2720-8554) | 1391-1400 |
| 1 | 401-405 | ATLQA linker 1-5 | | |
| 1 | 406-423 | QLALFKGVHFVCNLLLLF | ORF3a_protein@CostaRica(NC_045512@ | 70-87 |
| | | | CostaRica: + : 25393-26220) | |
| 1 | 424-428 | ATLQA linker 1-5 | | |
| 1 | 429-442 | APGCDVTDVTQLYL | helicase@Aruba(NC_045512@Aruba: + : | 52-65 |
| | | | (16237-18039) | |
| 1 | 443-447 | ATLQA linker 1-5 | | |
| 1 | 448-459 | ISVTTEILPVSM | surface_glycoprotein(NC_045512: + : | 720-731 |
| | | | 21563-25384) | |
| 1 | 460-464 | ATLQA linker 1-5 | | |
| 1 | 465-481 | PNFVFPLNSIIKTIQPR | nsp2(NC_045512: + : 806-2719) | 91-107 |
| 1 | 482-486 | ATLQA linker 1-5 | | |
| 1 | 487-499 | QCVQLHNDILLAK | nsp7(NC_045512: + : 11843-12091) | 31-43 |
| 1 | 500-504 | ATLQA linker 1-5 | | |
| 1 | 505-524 | ARRPFLCCKCCYDHVISTSH | helicase(NC_045512: + : | 20-39 |
| | | | 16237-18039) | |
| 1 | 525-529 | ATLQA linker 1-5 | | |
| 1 | 530-549 | DANYFLCWHTNCYHYCIPYN | ORF3a_protein@Indonesia(NC_045512@ | 142-161 |
| | | | Indonesia: + : 25393-26220) | |
| 1 | 550-554 | ATLQA linker 1-5 | | |
| 1 | 555-562 | APLEILCV | ORF8_protein(NC_045512: + : | 55-62 |
| | | | 27894-28259) | |
| 1 | 563-567 | ATLQA linker 1-5 | | |
| 1 | 568-575 | TDVVYRAF | RNA-dependent_RNA_polymerase@ | 28-35 |
| | | | Aruba(NC_045512@Aruba: + : | |
| | | | 13442-13468 + 13468-16236) | |
| 1 | 576-580 | ATLQA linker 1-5 | | |
| 1 | 581-595 | FSVAALTNNVAFQTV | RNA-dependent_RNA_polymerase | 396-410 |
| | | | (NC_045512: + : 13442-13468 + | |
| | | | 13468-16236) | |
| 1 | 596-600 | ATLQA linker 1-5 | | |
| 1 | 601-620 | KLTCATTRQVVNVVTTKIAL | nsp3(NC_045512: + : 2720-8554) | 1923-1942 |
| 1 | 621-625 | ATLQA linker 1-5 | | |
| 1 | 626-648 | RVDFCGKGYHLMSFPQSAPHGVV | surface_glycoprotein(NC_045512: + : | 1039-1061 |
| | | | 21563-25384) | |
| 1 | 649-653 | ATLQA linker 1-5 | | |
| 1 | 654-661 | KAVFISPY | helicase(NC_045512: + : | 508-515 |
| | | | 16237-18039) | |
| 1 | 662-666 | ATLQA linker 1-5 | | |
| 1 | 667-674 | YDKLVSSF | nsp3(NC_045512: + : 2720-8554) | 365-372 |
| 1 | 675-679 | ATLQA linker 1-5 | | |
| 1 | 680-693 | ITTVAAFHQECSLQ | ORF8_protein@Aruba(NC_045512@ | 10-23 |
| | | | Aruba: + : 27894-28259) | |
| 1 | 694-698 | ATLQA linker 1-5 | | |
| 1 | 699-707 | RSVYPVASP | nsp2(NC_045512: + : 806-2719) | 121-129 |
| 1 | 708-712 | ATLQA linker 1-5 | | |
| 1 | 713-727 | ALLAVFHSASKIITL | ORF3a_protein@Aruba(NC_045512@ | 51-65 |
| | | | Aruba: + : 25393-26220) | |
| 1 | 728-732 | ATLQA linker 1-5 | | |
| 1 | 733-740 | TFSVLACY | 3C-like_proteinase(NC_045512: + : | 111-118 |
| | | | 10055-10972) | |
| 1 | 741-745 | ATLQA linker 1-5 | | |
| 1 | 746-763 | CANFNVLFSTVFPFTSFG | RNA-dependent_RNA_polymerase@ | 310-327 |
| | | | Nigeria(NC_045512@Nigeria: + : | |
| | | | 13442-13468 + 13468-16236) | |
| 1 | 764-768 | ATLQA linker 1-5 | | |
| 1 | 769-776 | YDFAVSKG | RNA-dependent_RNA_polymerase@ | 420-427 |
| | | | Aruba(NC_045512@Aruba: + : | |
| | | | 13442-13468 + 13468-16236) | |
| 1 | 777-781 | ATLQA linker 1-5 | | |
| 1 | 782-791 | ISEHDYQIGG | ORF3a_protein@FrenchGiana | 179-188 |
| | | | (NC_045512@FrenchGiana: + : | |
| | | | 25393-26220) | |
| 1 | 792-796 | ATLQA linker 1-5 | | |
| 1 | 797-810 | IRNLQHRLYECLYR | RNA-dependent_RNA_polymerase@ | 720-733 |
| | | | Austria(NC_045512@Austria: + : | |
| | | | 13442-13468 + 13468-16236) | |
| 1 | 811-815 | ATLQA linker 1-5 | | |
| 1 | 816-825 | LAWPLIVTAL | nsp8(NC_045512: + : 12092-12685) | 180-189 |
| 1 | 826-830 | ATLQA linker 1-5 | | |
| 1 | 831-847 | LTQYNRYLALYNKYKYF | nsp4(NC_045512: + : 8555-10054) | 438-454 |
| 1 | 848-852 | ATLQA linker 1-5 | | |
| 1 | 853-871 | CYDYCIPYNSVTSLIVITS | ORF3a_protein@Netherlands | 153-171 |
| | | | (NC_045512@Netherlands: + : | |
| | | | 25393-26220) | |
| 1 | 872-876 | ATLQA linker 1-5 | | |
| 1 | 877-884 | DSYFVVKR | RNA-dependent_RNA_polymerase | 67-74 |
| | | | (NC_045512: + : 13442-13468 + | |
| | | | 13468-16236) | |
| 1 | 885-889 | ATLQA linker 1-5 | | |
| 1 | 890-906 | INFVRIIMRLWLCCKCR | ORF3a_protein@Australia | 118-134 |
| | | | (NC_045512@Australia: + : | |
| | | | 25393-26220) | |
| 1 | 907-911 | ATLQA linker 1-5 | | |
| 1 | 912-926 | INAACRKVQHMVVKA | 3′-to-5′_exonuclease(NC_045512: + : | 305-319 |
| | | | 18040-19620) | |
| 1 | 927-931 | ATLQA linker 1-5 | | |
| 1 | 932-946 | EVPANSTVLSFCAFA | nsp10(NC_045512: + : 13025-13441) | 6-20 |
| 1 | 947-951 | ATLQA linker 1-5 | | |
| 1 | 952-971 | RAKHYVYIGDPAQLPAPRTL | helicase(NC_045512: + : | 392-411 |
| | | | 16237-18039) | |
| 1 | 972-976 | ATLQA linker 1-5 | | |
| 1 | 977-989 | YAKPFLNKVVSTT | nsp3(NC_045512: + : 2720-8554) | 1323-1335 |
| 1 | 990-994 | ATLQA linker 1-5 | | |
| 1 | 995-1008 | EGVVDYGARFYFYT | nsp3(NC_045512: + : 2720-8554) | 595-608 |
| 1 | 1009-1013 | ATLQA linker 1-5 | | |
| 1 | 1014-1035 | NVVIKVCEFQFCNYPFLGVYYH | surface_glycoprotein@Brazil | 125-146 |
| | | | (NC_045512@Brazil: + : | |
| | | | 21563-25384) | |
| 1 | 1036-1040 | ATLQA linker 1-5 | | |
| 1 | 1041-1059 | ANSVFNICQAVTANVNALL | RNA-dependent_RNA_polymerase@ | 690-708 |
| | | | Aruba(NC_045512@Aruba: + : | |
| | | | 13442-13468 + 13468-16236) | |
| 1 | 1060-1064 | ATLQA linker 1-5 | | |
| 1 | 1065-1073 | AGFSLWVYK | 3′-to-5′_exonuclease(NC_045512: + : | 504-512 |
| | | | 18040-19620) | |
| 1 | 1074-1078 | ATLQA linker 1-5 | | |
| 1 | 1079-1086 | ISNCVADY | surface_glycoprotein(NC_045512: + : | 358-365 |
| | | | 21563-25384) | |
| 1 | 1087-1091 | ATLQA linker 1-5 | | |
| 1 | 1092-1107 | GSNVFQTRAGCLIGAE | surface_glycoprotein(NC_045512: + : | 639-654 |
| | | | 21563-25384) | |
| 1 | 1108-1112 | ATLQA linker 1-5 | | |
| 1 | 1113-1120 | FTGCVIAW | surface_glycoprotein(NC_045512: + : | 429-436 |
| | | | 21563-25384) | |
| 1 | 1121-1125 | ATLQA linker 1-5 | | |
| 1 | 1126-1136 | LRIAGHHLGRC | membrane_glycoprotein(NC_045512: + | 149-159 |
| | | | : 26523-27191) | |
| 1 | 1137-1141 | ATLQA linker 1-5 | | |
| 1 | 1142-1161 | YVYLPYPDPSRILGAGCFVD | RNA-dependent_RNA_polymerase | 826-845 |
| | | | (NC_045512: + : 13442-13468 + | |
| | | | 13468-16236) | |
| 1 | 1162-1166 | ATLQA linker 1-5 | | |
| 1 | 1167-1186 | PINLVRGLPQGFSVLEPLVD | surface_glycoprotein@SmallAfrica | 209-228 |
| | | | (NC_045512@SmallAfrica: + : | |
| | | | 21563-25384) | |
| 1 | 1187-1191 | ATLQA linker 1-5 | | |
| 1 | 1192-1206 | IPIRASLPFGWLIVG | ORF3a_protein@Iceland(NC_045512@ | 35-49 |
| | | | Iceland: + : 25393-26220) | |
| 1 | 1207-1211 | ATLQA linker 1-5 | | |
| 1 | 1212-1225 | ETKCTLKSFTVEKG | surface_glycoprotein@Aruba | 294-307 |
| | | | (NC_045512@Aruba: + : 21563-25384) | |
| 1 | 1226-1230 | ATLQA linker 1-5 | | |
| 1 | 1231-1240 | KQYGDCLGNI | surface_glycoprotein@Jordan | 831-840 |
| | | | (NC_045512@Jordan: + : 21563-25384) | |
| 1 | 1241-1245 | ATLQA linker 1-5 | | |
| 1 | 1246-1254 | AAAYYVGYL | surface_glycoprotein(NC_045512: + : | 262-270 |
| | | | 21563-25384) | |
| 1 | 1255-1259 | ATLQA linker 1-5 | | |
| 1 | 1260-1269 | TQNVLYENQK | surface_glycoprotein(NC_045512: + : | 912-921 |
| | | | 21563-25384) | |
| 1 | 1270-1274 | ATLQA linker 1-5 | | |
| 1 | 1275-1284 | QEHYVRITGL | helicase(NC_045512: + : | 243-252 |
| | | | 16237-18039) | |
| 1 | 1285-1289 | ATLQA linker 1-5 | | |
| 1 | 1290-1309 | MTSCCSCLKGCCSCGSCCKF | surface_glycoprotein(NC_045512: + : | 1237-1256 |
| | | | 21563-25384) | |
| 1 | 1310-1314 | ATLQA linker 1-5 | | |
| 1 | 1315-1330 | SLRCGACIRRPFLCCK | helicase@Aruba(NC_045512@Aruba: + : | 13-28 |
| | | | 16237-188039) | |
| 2 | 1-17 | LECNVKTTEVVGDIILK | nsp3(NC_045512: + : 2720-8554) | 1244-1260 |
| 2 | 18-22 | ATLQA linker 1-5 | | |
| 2 | 23-33 | HFPRKGVFVSN | surface_glycoprotein@SmallAsia | 1078-1088 |
| | | | (NC_045512@SmallAsia: + : | |
| | | | 21563-25384) | |
| 2 | 34-38 | ATLQA linker 1-5 | | |
| 2 | 39-46 | WFTALTQH | nucleocapsid_phosphoprotein | 52-59 |
| | | | (NC_045512: + : 28274-29533) | |
| 2 | 47-51 | ATLQA linker 1-5 | | |
| 2 | 52-79 | FTSDYYQLYSTQLSTYTGVEHVTFF | ORF3a_protein@Latvia(NC_045512@ | 207-234 |
| | | IYN | Latvia: + : 25393-26220) | |
| 2 | 80-84 | ATLQA linker 1-5 | | |
| 2 | 85-104 | LQKAAITILDGISQYSLRLI | nsp2(NC_045512: + : 806-2719) | 382-401 |
| 2 | 105-109 | ATLQA linker 1-5 | | |
| 2 | 110-117 | ISEHDYQI | ORF3a_protein@Aruba(NC_045512@ | 179-186 |
| | | | Aruba: + : 25393-26220) | |
| 2 | 118-122 | ATLQA linker 1-5 | | |
| 2 | 123-132 | KNTVCTVCGM | nsp10(NC_045512: + : 10325-13441) | 113-122 |
| 2 | 133-137 | ATLQA linker 1-5 | | |
| 2 | 138-158 | KLSYGIAIVREVLSDRELHLS | helicase@Colombia(NC_045512@ | 146-166 |
| | | | Colombia: + : 16237-18039) | |
| 2 | 159-163 | ATLQA linker 1-5 | | |
| 2 | 164-183 | GYLPQNAVVKIYCPACHNSE | nsp2(NC_045512: + : 806-2719) | 178-197 |
| 2 | 184-188 | ATLQA linker 1-5 | | |
| 2 | 189-197 | VFSQCVNLT | surface_glycoprotein@Egypt | 11-19 |
| | | | (NC_045512@Egypt: + : 21563-25384) | |
| 2 | 198-202 | ATLQA linker 1-5 | | |
| 2 | 203-220 | DKACPLIAAVITREVGFV | nsp4(NC_045512: + : 8555-10054) | 85-102 |
| 2 | 221-225 | ATLQA linker 1-5 | | |
| 2 | 226-237 | VPVVDSYYSLLM | RNA-dependent_RNA_polymerase | 231-242 |
| | | | (NC_045512: + : 13442-13468 + | |
| | | | 13468-16236) | |
| 2 | 238-242 | ATLQA linker 1-5 | | |
| 2 | 243-250 | SSIVITSV | ORF3a_protein@Aruba(NC_045512@ | 165-172 |
| | | | Aruba: + : 25393-26220) | |
| 2 | 251-255 | ATLQA linker 1-5 | | |
| 2 | 256-263 | LPINVIVF | nsp3(NC_045512: + : 2720-8554) | 1718-1725 |
| 2 | 264-268 | ATLQA linker 1-5 | | |
| 2 | 269-276 | MADLVYAL | RNA-dependent_RNA_polymerase | 124-131 |
| | | | (NC_045512: + : 13442-13468 + | |
| | | | 13468-16236) | |
| 2 | 277-281 | ATLQA linker 1-5 | | |
| 2 | 282-289 | KLGASQRV | membrane_glycoprotein(NC_045512: + | 180-187 |
| | | | : 26523-27191) | |
| 2 | 290-294 | ATLQA linker 1-5 | | |
| 2 | 295-304 | PFTINCQEPK | ORF8_protein@India(NC_045512@ | 85-94 |
| | | | India: + : 27894-28259) | |
| 2 | 305-309 | ATLQA linker 1-5 | | |
| 2 | 310-320 | KGVQIPCTCGK | nsp3(NC_045512: + : 2720-8554) | 963-973 |
| 2 | 321-325 | ATLQA linker 1-5 | | |
| 2 | 326-337 | SSPDAVTAYNGY | nsp3(NC_045512: + : 2720-8554) | 660-671 |
| 2 | 338-342 | ATLQA linker 1-5 | | |
| 2 | 343-365 | YLGGMSYYCKSHKLPISFPLCAN | helicase@CostaRica(NC_045512@ | 64-86 |
| | | | CostaRica: + : 16237-18039) | |
| 2 | 366-370 | ATLQA linker 1-5 | | |
| 2 | 371-378 | AEVQIDRL | surface_glycoprotein(NC_045512: + | 989-996 |
| | | | : 21563-25384) | |
| 2 | 379-383 | ATLQA linker 1-5 | | |
| 2 | 384-434 | HFAIGLALYYPSARIVYTACSHAAV | helicase(NC_045512: + : | 290-340 |
| | | DALCEKALKYLPIDKCSRIIPARAR | 16237-18039) | |
| | | V | | |
| 2 | 435-439 | ATLQA linker 1-5 | | |
| 2 | 440-457 | LFVVEVVDKYFDCYDGGC | RNA-dependent_RNA_polymerase | 470-487 |
| | | | (NC_045512: + : 13442-13468 + | |
| | | | 13468-16236) | |
| 2 | 458-462 | ATLQA linker 1-5 | | |
| 2 | 463-478 | ATVAYFNMVYMPASWV | nsp6@Aruba(NC_045512@Aruba: + : | 76-91 |
| | | | 10973-11842) | |
| 2 | 479-483 | ATLQA linker 1-5 | | |
| 2 | 484-498 | QIELKFNPPALQDAY | nsp3(NC_045512: + : 2720-8554) | 867-881 |
| 2 | 499-503 | ATLQA linker 1-5 | | |
| 2 | 504-511 | TQALLQRQ | nucleocapsid_phosphoprotein@ | 379-386 |
| | | | CostaRica(NC_045512@CostaRica: + : | |
| | | | 28274-29533) | |
| 2 | 512-516 | ATLQA linker 1-5 | | |
| 2 | 517-526 | LPFTINCQEL | ORF8_protein@Mozambique(NC_045512@ | 84-93 |
| | | | Mozambique: + : 27894-28259) | |
| 2 | 527-531 | ATLQA linker 1-5 | | |
| 2 | 532-541 | YDANYFLCWH | ORF3a_protein(NC_045512: + : | 141-150 |
| | | | 25393-26220) | |
| 2 | 542-546 | ATLQA linker 1-5 | | |
| 2 | 547-556 | VVADAVIKTL | nsp3(NC_045512: + : 2720-8554) | 56-65 |
| 2 | 557-561 | ATLQA linker 1-5 | | |
| 2 | 562-582 | HPNCVNCSDDRCILHCANFNV | RNA-dependent_RNA_polymerase@ | 295-315 |
| | | | Aruba(NC_045512@Aruba: + : | |
| | | | 13442-13468 + 13468-16236) | |
| 2 | 583-587 | ATLQA linker 1-5 | | |
| 2 | 588-603 | RKIFVDGVPFVVSTGY | RNA-dependent_RNA_polymerase | 331-346 |
| | | | (NC_045512: + : 13442-13468 + | |
| | | | 13468-16236) | |
| 2 | 604-608 | ATLQA linker 1-5 | | |
| 2 | 609-620 | FRSSVLHSTQDL | surface_glycoprotein@Aruba | 43-54 |
| | | | (NC_045512@Aruba: + : 21563-25384) | |
| 2 | 621-625 | ATLQA linker 1-5 | | |
| 2 | 626-648 | GKIQDSLFSTASALGKLQDVVNQ | surface_glycoprotein@NorthMacedonia | 928-950 |
| | | | (NC_045512@NorthMacedonia: + : | |
| | | | 21563-25384) | |
| 2 | 649-653 | ATLQA linker 1-5 | | |
| 2 | 654-662 | YDLSVVNAR | helicase(NC_045512: + : | 382-390 |
| | | | 16237-18039) | |
| 2 | 663-667 | ATLQA linker 1-5 | | |
| 2 | 668-681 | SDRVVFVLWAHGFE | 3′-to-5′_exonuclease(NC_045512: + : | 178-191 |
| | | | 18040-19620) | |
| 2 | 682-686 | ATLQA linker 1-5 | | |
| 2 | 687-715 | FAFACPDGVKHVYQLRARSVSPKLF | ORF7a_protein(NC_045512: + : | 63-91 |
| | | IRQE | 27394-27759) | |
| 2 | 716-720 | ATLQA linker 1-5 | | |
| 2 | 721-739 | VKDCVVLHSYFTSDYYQLY | ORF3a_protein@Aruba(NC_045512@ | 197-215 |
| | | | Aruba: + : 25393-26220) | |
| 2 | 740-744 | ATLQA linker 1-5 | | |
| 2 | 745-756 | TRAKVGILCIMS | helicase(NC_045512: + : | 566-577 |
| | | | 16237-18039) | |
| 2 | 757-761 | ATLQA linker 1-5 | | |
| 2 | 762-793 | MMFVKHKHAFLVLFLLPSFATVAYF | nsp6@Indonesia(NC_045512@Indonesia: | 57-88 |
| | | NMVYMPA | + : 10973-11842) | |
| 2 | 794-798 | ATLQA linker 1-5 | | |
| 2 | 799-806 | SDDAVVCF | RNA-dependent_RNA_polymerase@Aruba | 759-766 |
| | | | (NC_045512@Aruba: + : | |
| | | | 13442-13468 + 13468-16236) | |
| 2 | 807-811 | ATLQA linker 1-5 | | |
| 2 | 812-819 | YLKLRSDV | nsp4(NC_045512: + : 8555-10054) | 427-434 |
| 2 | 820-824 | ATLQA linker 1-5 | | |
| 2 | 825-834 | KSASVYYSQL | nsp3(NC_045512: + : 2720-8554) | 1737-1746 |
| 2 | 835-839 | ATLQA linker 1-5 | | |
| 2 | 840-856 | AQSFLNRVCGVSAARLT | RNA-dependent_RNA_polymerase | 4-20 |
| | | | (NC_045512: + : 13442-13468 + | |
| | | | 13468-16236) | |
| 2 | 857-861 | ATLQA linker 1-5 | | |
| 2 | 862-869 | FNSVCRLM | helicase@Aruba(NC_045512@Aruba: + : | 422-429 |
| | | | 16237-18039) | |
| 2 | 870-874 | ATLQA linker 1-5 | | |
| 2 | 875-888 | HKWPQAIQFAPSAS | nucleocapsid_phosphoprotein@ | 299-312 |
| | | | Australia(NC_045512@Australia: + : | |
| | | | 28274-29533) | |
| 2 | 889-893 | ATLQA linker 1-5 | | |
| 2 | 894-906 | GVNLVAVPTGYVD | 3′-to-5′_exonuclease(NC_045512: + : | 114-126 |
| | | | 18040-19620) | |
| 2 | 907-911 | ATLQA linker 1-5 | | |
| 2 | 912-933 | GYQPYRVVVLSFELLHAPATVC | surface_glycoprotein(NC_045512: + : | 504-525 |
| | | | 21563-25384) | |
| 2 | 934-938 | ATLQA linker 1-5 | | |
| 2 | 939-957 | QLSLSKGFHFVCNLLLLFV | ORF3a_protein@Estonia(NC_045512@ | 70-88 |
| | | | Estonia: + : 25393-26220) | |
| 2 | 958-962 | ATLQA linker 1-5 | | |
| 2 | 963-979 | INFVRIIMRLWLCLKCR | ORF3a_protein@Mozambique(NC_045512@ | 118-134 |
| | | | Mozambique: + : 25393-26220) | |
| 2 | 980-984 | ATLQA linker 1-5 | | |
| 2 | 985-993 | KLMVVIPDY | nsp8(NC_045512: + : 12092-12685) | 127-135 |
| 2 | 994-998 | ATLQA linker 1-5 | | |
| 2 | 999-1009 | IEELFYSYATH | 3′-to-5′_exonuclease(NC_045512: + : | 363-373 |
| | | | 18040-19620) | |
| 2 | 1010-1014 | ATLQA linker 1-5 | | |
| 2 | 1015-1025 | AALALLLLDRL | nucleocapsid_phosphoprotein@Aruba | 217-227 |
| | | | (NC_045512@Aruba: + : 28274-29533) | |
| 2 | 1026-1030 | ATLQA linker 1-5 | | |
| 2 | 1031-1044 | DYDCVSFCYMHHME | 3C-like_proteinase(NC_045512: + : | 153-166 |
| | | | 10055-10972) | |
| 2 | 1045-1049 | ATLQA linker 1-5 | | |
| 2 | 1050-1057 | AWLYAAVI | 3C-like_proteinase(NC_045512: + : | 206-213 |
| | | | 10055-10972) | |
| 2 | 1058-1062 | ATLQA linker 1-5 | | |
| 2 | 1063-1075 | NFRVQPTESIVRF | surface_glycoprotein(NC_045512: + : | 317-329 |
| | | | 21563-25384) | |
| 2 | 1076-1080 | ATLQA linker 1-5 | | |
| 2 | 1084-1103 | YALVYFLQSINFVIIIMRLWLCW | ORF3a_protein@Denmark(NC_045512@ | 109-131 |
| | | | Denmark: + : 25393-26220) | |
| 2 | 1104-1108 | ATLQA linker 1-5 | | |
| 2 | 1109-1120 | ALGKLQDVVNQN | surface_glycoprotein(NC_045512: + : | 944-955 |
| | | | 21563-25384) | |
| 2 | 1121-1125 | ATLQA linker 1-5 | | |
| 2 | 1126-1134 | IQLSSYSLF | 2′-O-ribose_methyltransferase | 237-245 |
| | | | (NC_045512: + : 20659-21552) | |
| 2 | 1135-1139 | ATLQA linker 1-5 | | |
| 2 | 1140-1149 | NYQCGHYKHI | nsp3(NC_045512: + : 2720-8554) | 1012-1021 |
| 2 | 1150-1154 | ATLQA linker 1-5 | | |
| 2 | 1155-1165 | ETICAPLTVFF | endoRNAse(NC_045512: + : | 113-123 |
| | | | 19621-20658) | |
| 2 | 1166-1170 | ATLQA linker 1-5 | | |
| 2 | 1171-1184 | RNLQHRLYECLYRN | RNA-dependent_RNA_polymerase | 721-734 |
| | | | (NC_045512: + : 13442-13468 + | |
| | | | 13468-16236) | |
| 2 | 1185-1189 | ATLQA linker 1-5 | | |
| 2 | 1190-1197 | FNSVCRFM | helicase@Malaysia(NC_045512@ | 422-429 |
| | | | Malaysia: + : 16237-18039) | |
| 2 | 1198-1202 | ATLQA linker 1-5 | | |
| 2 | 1203-1212 | SSVLHSTQDF | surface_glycoprotein@Norway | 45-54 |
| | | | (NC_045512@Norway: + : | |
| | | | 21563-25384) | |
| 2 | 1213-1217 | ATLQA linker 1-5 | | |
| 2 | 1218-1228 | MMFVKHKHAFL | nsp6@Aruba(NC_045512@Aruba: + : | 57-67 |
| | | | 10973-11842) | |
| 2 | 1229-1233 | ATLQA linker 1-5 | | |
| 2 | 1234-1242 | LKLKDCVMY | nsp6@Aruba(NC_045512@Aruba: + : | 105-113 |
| | | | 10973-11842) | |
| 2 | 1243-1247 | ATLQA linker 1-5 | | |
| 2 | 1248-1262 | EFQFCNYPFLGVYHK | surface_glycoprotein@Norway | 129-143 |
| | | | (NC_045512@Norway: + : | |
| | | | 21563-25384) | |
| 2 | 1263-1267 | ATLQA linker 1-5 | | |
| 2 | 1268-1279 | TRAKVGILCITS | helicase@SouthKorea(NC_045512@ | 566-577 |
| | | | SouthKorea: + : 16237-18039) | |
| 2 | 1280-1284 | ATLQA linker 1-5 | | |
| 2 | 1285-1292 | TDAVDCAL | surface_glycoprotein(NC_045512: + : | 286-293 |
| | | | 21563-25384) | |
| 2 | 1293-1297 | ATLQA linker 1-5 | | |
| 2 | 1298-1311 | IKVCEFQFCNDPYY | surface_glycoprotein@CostaRica | 128-141 |
| | | | (NC_045512@CostaRica: + : | |
| | | | 21563-25384) | |
| 2 | 1312-1316 | ATLQA linker 1-5 | | |
| 2 | 1317-1338 | LLYDANYFLCWHINCYDYCIPY | ORF3a_protein@Estonia(NC_045512@ | 139-160 |
| | | | Estonia: + : 25393-26220) | |
| 3 | 1-14 | ANPVLPFNDGVYFA | surface_glycoprotein@Austria | 77-90 |
| | | | (NC_045512@Austria: + : | |
| | | | 21563-25384) | |
| 3 | 15-19 | ATLQA linker 1-5 | | |
| 3 | 20-31 | VTMPLGYVTHGL | nsp3(NC_045512: + : 2720-8554) | 628-639 |
| 3 | 32-36 | ATLQA linker 1-5 | | |
| 3 | 37-48 | FNCYFPLQSYGF | surface_glycoprotein(NC_045512: + : | 486-497 |
| | | | 21563-25384) | |
| 3 | 49-53 | ATLQA linker 1-5 | | |
| 3 | 54-68 | ARSVARQSIIAYTMS | surface_glycoprotein@Mozambique | 680-694 |
| | | | (NC_045512@Mozambique: + : | |
| | | | 21563-25384) | |
| 3 | 69-73 | ATLQA linker 1-5 | | |
| 3 | 74-100 | AKYTQLCQYLNTLTLAVPYNMRVIH | 2′-O-ribose_methyltransferase | 45-71 |
| | | F | (NC_045512: + : 20659-21552) | |
| 3 | 101-105 | ATLQA linker 1-5 | | |
| 3 | 106-115 | AGAALQIPFA | surface_glycoprotein@Nigeria | 886-895 |
| | | | (NC_045512@Nigeria: + : | |
| | | | 21563-25384) | |
| 3 | 116-120 | ATLQA linker 1-5 | | |
| 3 | 121-133 | LLNVPLHGTILTR | membrane_glycoprotein(NC_045512: + | 119-131 |
| | | | : 26523-27191) | |
| 3 | 134-138 | ATLQA linker 1-5 | | |
| 3 | 139-146 | VVNPVMEP | ORF3a_protein(NC_045512: + : | 255-262 |
| | | | 25393-26220) | |
| 3 | 147-151 | ATLQA linker 1-5 | | |
| 3 | 152-173 | SQHTMLVKQFDDYVYLPYPDPS | RNA-dependent_RNA_polymerase@ | 814-835 |
| | | | Estonia(NC_045512@Estonia: + : | |
| | | | 13442-13468 + 13468-16236) | |
| 3 | 174-178 | ATLQA linker 1-5 | | |
| 3 | 179-190 | FQTLLHRSYLTP | surface_glycoprotein@SmallAsia | 230-241 |
| | | | (NC_045512@SmallAsia: + : | |
| | | | 21563-25384) | |
| 3 | 191-195 | ATLQA linker 1-5 | | |
| 3 | 196-207 | IEVQGYKSVNIT | nsp3(NC_045512: + : 2720-8554) | 13-24 |
| 3 | 208-212 | ATLQA linker 1-5 | | |
| 3 | 213-223 | YCPRHVICTSE | 3C-like_proteinase(NC_045512: + : | 37-47 |
| | | | 10055-10972) | |
| 3 | 224-228 | ATLQA linker 1-5 | | |
| 3 | 229-237 | EPLLKGVKL | surface_glycoprotein@Croatia | 1258-1266 |
| | | | (NC_045512@Croatia: + : | |
| | | | 21563-25384) | |
| 3 | 238-242 | ATLQA linker 1-5 | | |
| 3 | 243-250 | YDFVVSKG | RNA-dependent_RNApolymerase@Japan | 420-427 |
| | | | (NC_045512@Japan: + : | |
| | | | 13442-13468 + 13468-16236) | |
| 3 | 251-255 | ATLQA linker 1-5 | | |
| 3 | 256-266 | YDKLQFISLEI | helicase@SouthAfrica(NC_045512@ | 582-592 |
| | | | SouthAfrica: + : 16237-18039) | |
| 3 | 267-271 | ATLQA linker 1-5 | | |
| 3 | 272-279 | REGVFVSN | surface_glycoprotein@Aruba | 1087-1094 |
| | | | (NC_045512@Aruba: + : | |
| | | | 21563-25384) | |
| 3 | 280-284 | ATLQA linker 1-5 | | |
| 3 | 285-295 | YELKHGTFTCA | nsp3(NC_045512: + : 2720-8554) | 996-1006 |
| 3 | 296-300 | ATLQA linker 1-5 | | |
| 3 | 301-316 | FLVLLPLVSSQCVNLT | surface_glycoprotein@Aruba | 4-19 |
| | | | (NC_045512@Aruba: + : | |
| | | | 21563-25384) | |
| 3 | 317-321 | ATLQA linker 1-5 | | |
| 3 | 322-335 | LMNVLTLVYKVYYG | nsp6@Aruba(NC_045512@Aruba: + : | 139-152 |
| | | | 10973-11842) | |
| 3 | 336-340 | ATLQA linker 1-5 | | |
| 3 | 341-353 | KASCTLSEQLDFI | nsp2(NC_045512: + : 806-2719) | 30-42 |
| 3 | 354-358 | ATLQA linker 1-5 | | |
| 3 | 359-371 | YTELEPPCRFVTD | nsp9(NC_045512: + : 12686-13024) | 66-78 |
| 3 | 372-376 | ATLQA linker 1-5 | | |
| 3 | 377-387 | DNVLSTFISAA | nsp3(NC_045512: + : 2720-8554) | 1809-1819 |
| 3 | 388-392 | ATLQA linker 1-5 | | |
| 3 | 393-419 | FSASTSAFVETVKGLDYKAFKQIVE | nsp2(NC_045512: + : 806-2719) | 300-326 |
| | | SC | | |
| 3 | 420-424 | ATLQA linker 1-5 | | |
| 3 | 425-432 | DVLYQPPQ | nsp4(NC_045512: + : 8555-10054) | 484-491 |
| 3 | 433-437 | ATLQA linker 1-5 | | |
| 3 | 438-453 | DKYVRNLQHRLYECLY | RNA-dependent_RNA_polymerase@ | 717-732 |
| | | | Aruba(NC_045512@Aruba: + : | |
| | | | 13442-13468 + 13468-16236) | |
| 3 | 454-458 | ATLQA linker 1-5 | | |
| 3 | 459-487 | TLQCIMLVYCFLGYFCTCYFGLFCL | nsp6@Aruba(NC_045512@Aruba: + : | 203-231 |
| | | LNRY | 10973-11842) | |
| 3 | 488-492 | ATLQA linker 1-5 | | |
| 3 | 493-502 | TLPVNVAFEL | endoRNAse(NC_045512: + : | 48-57 |
| | | | 19621-20658) | |
| 3 | 503-507 | ATLQA linker 1-5 | | |
| 3 | 508-517 | ALLAVFHNAS | ORF3a_protein@SmallSouthAmerica | 51-60 |
| | | | (NC_045512@SmallSouthAmerica: + : | |
| | | | 25393-26220) | |
| 3 | 518-522 | ATLQA linker 1-5 | | |
| 3 | 523-536 | TDTCVEHVTFFIYN | ORF3a_protein@Luxemburg | 221-234 |
| | | | (NC_045512@Luxembourg: + : | |
| | | | 25393-26220) | |
| 3 | 537-541 | ATLQA linker 1-5 | | |
| 3 | 542-550 | APLIELCVD | ORF8_protein@Bangladesh(NC_04551@ | 55-63 |
| | | | Bangladesh: + : 27894-28259) | |
| 3 | 551-555 | ATLQA linker 1-5 | | |
| 3 | 556-566 | RQALLKTVQFC | RNA-dependent_RNA_polymerase@ | 183-193 |
| | | | Aruba(NC_045512@Aruba: + : | |
| | | | 13442-13468 + 13468-16236) | |
| 3 | 567-571 | ATLQA linker 1-5 | | |
| 3 | 572-579 | DMYSVMLT | RNA-dependent_RNA_polymerase@ | 901-908 |
| | | | Malaysia(NC_045512@Malaysia: + : | |
| | | | 13442-13468 + 13468-16236) | |
| 3 | 580-584 | ATLQA linker 1-5 | | |
| 3 | 585-599 | FKELLVYAADPAMHA | RNA-dependent_RNA_polymerase | 368-382 |
| | | | (NC_04551: + : 13442-13468 + | |
| | | | 13468-16236) | |
| 3 | 600-604 | ATLQA linker 1-5 | | |
| 3 | 605-617 | FQTLLALHRSYLT | surface_glycoprotein@Aruba | 234-246 |
| | | | (NC_04551@Aruba: + : | |
| | | | 21563-25384) | |
| 3 | 618-622 | ATLQA linker 1-5 | | |
| 3 | 623-637 | TYGVGYQPYRVVVLS | surface_glycoprotein@Australia | 496-510 |
| | | | (NC_045512@Australia: + : | |
| | | | 21563-25384) | |
| 3 | 638-642 | ATLQA linker 1-5 | | |
| 3 | 643-659 | GVHFVCNLLLLFVIVYS | ORF3a_protein@Malaysia | 76-92 |
| | | | (NC_045512@Malaysia: + : | |
| | | | 25393-26220) | |
| 3 | 660-664 | ATLQA linker 1-5 | | |
| 3 | 665-684 | FCKLHNWNCVNCDTFCAGST | nsp3(NC_045512: + : 2720-8554) | 1626-1645 |
| 3 | 685-689 | ATLQA linker 1-5 | | |
| 3 | 690-705 | LMNVLTLFYKVYYGNA | nsp6@Chile(NC_045512@Chile: + : | 142-157 |
| | | | 10973-11842) | |
| 3 | 706-710 | ATLQA linker 1-5 | | |
| 3 | 711-733 | HQPYVVDDPCPIHFYSKWYIRVG | ORF8_protein(NC_04551: + : | 28-50 |
| | | | 27894-28259) | |
| 3 | 734-738 | ATLQA linker 1-5 | | |
| 3 | 739-749 | SAPLIELCLDE | ORF8_protein@Russia(NC_04551@ | 54-64 |
| | | | Russia: + : 27894-28259) | |
| 3 | 750-754 | ATLQA linker 1-5 | | |
| 3 | 755-777 | QLALSKGVYFVCNLLLLFVTVYS | ORF3a_protein@Aruba | 70-92 |
| | | | (NC_045512@Aruba: + : | |
| | | | 25393-26220) | |
| 3 | 778-782 | ATLQA linker 1-5 | | |
| 3 | 783-814 | IMASLVLARKHTTCCSLSHRFYRLA | RNA-dependent_RNA_polymerase | 632-663 |
| | | NECAQVL | (NC_04551: + : 13442-13468 + | |
| | | | 13468-16236) | |
| 3 | 815-819 | ATLQA linker 1-5 | | |
| 3 | 820-838 | KLNVGDYFVLTSHTVMPLS | helicase(NC_04551: + : | 218-236 |
| | | | 16237-18039) | |
| 3 | 839-843 | ATLQA linker 1-5 | | |
| 3 | 844-860 | YADVFHLYLQYIRKLHD | RNA-dependent_RNA_polymerase | 877-893 |
| | | | (NC_04551: + : 13442-13468 + | |
| | | | 13468-16236) | |
| 3 | 861-865 | ATLQA linker 1-5 | | |
| 3 | 866-876 | CYTPSKLIEYT | nsp4(NC_045512: + : 8555-10054) | 133-143 |
| 3 | 877-881 | ATLQA linker 1-5 | | |
| 3 | 882-890 | GVVQQLPET | endoRNAse(NC_045512: + : | 184-192 |
| | | | 19621-20658) | |
| 3 | 891-895 | ATLQA linker 1-5 | | |
| 3 | 896-915 | SEAVEAPLVGTPVCNINGLML | nsp2(NC_045512: + : 806-2719) | 591-610 |
| 3 | 916-920 | ATLQA linker 1-5 | | |
| 3 | 921-936 | SRIIPARAVDCFDKF | helicase@Brazil(NC_04551@Brazil: | 331-346 |
| | | | + : 16237-18039) | |
| 3 | 937-941 | ATLQA linker 1-5 | | |
| 3 | 942-953 | EVFAQVKQIYKT | surface_glycoprotein@Aruba | 776-787 |
| | | | (NC_045512@Aruba: + : | |
| | | | 21563-25384) | |
| 3 | 954-958 | ATLQA linker 1-5 | | |
| 3 | 959-971 | ISSVLNDILSRLD | surface_glycoprotein@Bangladesh | 972-984 |
| | | | (NC_045512@Bangladesh: + : | |
| | | | 21563-25384) | |
| 3 | 972-976 | ATLQA linker 1-5 | | |
| 3 | 977-988 | FSVNTWFHAIVS | surface_glycoprotein@Ghana | 59-70 |
| | | | (NC_045512@Ghana: + : | |
| | | | 21563-25384) | |
| 3 | 989-993 | ATLQA linker 1-5 | | |
| 3 | 994-1001 | PSFLGRYM | nsp3(NC_045512: + : 2720-8554) | 822-829 |
| 3 | 1002-1006 | ATLQA linker 1-5 | | |
| 3 | 1007-1020 | FGTYEKLKPVLDW | nsp2(NC_045512: + : 806-2719) | 437-450 |
| 3 | 1021-1025 | ATLQA linker 1-5 | | |
| 3 | 1026-1033 | IETISLAG | nsp3(NC_045512: + : 2720-8554) | 684-691 |
| 3 | 1034-1038 | ATLQA linker 1-5 | | |
| 3 | 1039-1047 | DYYQLYSTQ | ORF3a_protein(NC_045512: + : | 210-218 |
| | | | 25393-26220) | |
| 3 | 1048-1052 | ATLQA linker 1-5 | | |
| 3 | 1053-1062 | NEFYAYLRKH | RNA-dependent_RNA_polymerase | 972-984 |
| | | | (NC_04551: + : 13442-13468 + | |
| | | | 13468-16236) | |
| 3 | 1063-1067 | ATLQA linker 1-5 | | |
| 3 | 1068-1078 | GEVPVSIINNT | endoRNAse(NC_045512: + : | 20-30 |
| | | | 19621-20658) | |
| 3 | 1079-1083 | ATLQA linker 1-5 | | |
| 3 | 1084-1098 | ISNCVADYSVLYNSA | surface_glycoprotein@Aruba | 354-368 |
| | | | (NC_045512@Aruba: + : | |
| | | | 21563-25384) | |
| 3 | 1099-1103 | ATLQA linker 1-5 | | |
| 3 | 1104-1121 | VTTVIFLARGIVFNCVEY | nsp6@Malaysia(NC_045512@Malaysia: | 179-196 |
| | | | + : 10973-11842) | |
| 3 | 1122-1126 | ATLQA linker 1-5 | | |
| 3 | 1127-1146 | PINLVRGLPQGFSALEPLVD | surface_glycoprotein@Austria | 205-224 |
| | | | (NC_045512@Austria: + : | |
| | | | 21563-25384) | |
| 3 | 1147-1151 | ATLQA linker 1-5 | | |
| 3 | 1152-1159 | AALQIPFA | surface_glycoprotein(NC_045512: + : | 892-899 |
| | | | 21563-25384) | |
| 3 | 1160-1164 | ATLQA linker 1-5 | | |
| 3 | 1165-1175 | RFQLHRSYLTP | surface_glycoprotein@Austria | 233-243 |
| | | | (NC_045512@Austria: + : | |
| | | | 21563-25384) | |
| 3 | 1176-1180 | ATLQA linker 1-5 | | |
| 3 | 1181-1190 | VTGLFKDCSK | 3′-to-5′_exonuclease(NC_045512: + : | 4-13 |
| | | | 18040-19620) | |
| 3 | 1191-1195 | ATLQA linker 1-5 | | |
| 3 | 1196-1204 | FEHIVYGDF | endoRNAse(NC_045512: + : | 232-240 |
| | | | 19621-20658) | |
| 3 | 1205-1209 | ATLQA linker 1-5 | | |
| 3 | 1210-1224 | ALLAVFQSASKIITL | ORF2a_protein@Bangladesh | 51-65 |
| | | | (NC_045512@Bangladesh: + : | |
| | | | 25393-26220) | |
| 3 | 1225-1229 | ATLQA linker 1-5 | | |
| 3 | 1230-1239 | KCAYWVPRAS | nsp2(NC_045512: + : 806-2719) | 239-248 |
| 3 | 1240-1244 | ATLQA linker 1-5 | | |
| 3 | 1245-1259 | VDTSLSSLKLKDCVM | nsp6@Latvia(NC_045512@Latvia: + : | 101-115 |
| | | | 10973-11842) | |
| 3 | 1260-1264 | ATLQA linker 1-5 | | |
| 3 | 1265-1283 | ANSVFNICQSVTANVNALL | RNA-dependent_RNA_polymerase@ | 690-708 |
| | | | Croatia(NC_045512@Croatia: + : | |
| | | | 13442-13468 + 13468-16236) | |
| 3 | 1284-1288 | ATLQA linker 1-5 | | |
| 3 | 1289-1296 | YDPLQPEL | surface_glycoprotein(NC_045512: + : | 1138-1145 |
| | | | 21563-25384) | |
| 3 | 1297-1301 | ATLQA linker 1-5 | | |
| 3 | 1302-1311 | DPIHSLRVCV | nsp3(NC_045512: + : 2720-8554) | 339-348 |
| 3 | 1312-1316 | ATLQA linker 1-5 | | |
| 3 | 1317-1324 | CLNRVCTN | nsp3(NC_045512: + : 2720-8554) | 1342-1349 |
| 3 | 1325-1329 | ATLQA linker 1-5 | | |
| 3 | 1330-1338 | FFSNVTWFH | surface_glycoprotein(NC_045512: + : | 58-66 |
| | | | 21563-25384) | |
| 4 | 1-12 | TEISFMLWCKDG | endoRNAse(NC_045512: + : | 325-336 |
| | | | 19621-20658) | |
| 4 | 13-17 | ATLQA linker 1-5 | | |
| 4 | 18-35 | LNDLCFTNVYADSFVIRG | surface_glycoprotein(NC_045512: + : | 387-404 |
| | | | 21563-25384) | |
| 4 | 36-40 | ATLQA linker 1-5 | | |
| 4 | 41-50 | GTNLPLQLGF | 3′-to-5′_exonuclease(NC_045512: + : | 102-111 |
| | | | 18040-19620) | |
| 4 | 51-55 | ATLQA linker 1-5 | | |
| 4 | 56-76 | QWNLVGIFLFLTWICLLQFAY | membrane_glycoprotein@Aruba | 19-39 |
| | | | (NC_045512@Aruba: + : 26523-27191) | |
| 4 | 77-81 | ATLQA linker 1-5 | | |
| 4 | 82-102 | WMFLARGIVFMCVDYCPIFFI | nsp6@Cyprus(NC_045512@Cyprus: + : | 179-199 |
| | | | 10973-11842) | |
| 4 | 103-107 | ATLQA linker 1-5 | | |
| 4 | 108-115 | ETQALPQR | nucleocapsid_phosphoprotein@ | 378-385 |
| | | | SmallNorthAmerica(NC_045512@ | |
| | | | SmallNorthAmerica: + : | |
| | | | 28274-29533) | |
| 4 | 116-120 | ATLQA linker 1-5 | | |
| 4 | 121-130 | SPGVVNPVME | ORF2a_protein@Brazil(NC_045512@ | 252-261 |
| | | | Brazil: + : 25393-26220) | |
| 4 | 131-135 | ATLQA linker 1-5 | | |
| 4 | 136-146 | ITNCVKMLCTH | nsp10(NC_045512: + : 13025-13441) | 38-48 |
| 4 | 147-151 | ATLQA linker 1-5 | | |
| 4 | 152-171 | HYQECVRGTTVLLKEPCSSG | ORF3a_protein(NC_045512: + : | 19-38 |
| | | | 25393-26220) | |
| 4 | 172-176 | ATLQA linker 1-5 | | |
| 4 | 177-199 | KNPLLYDANYFLCCHTNCYDYCI | ORF2a_protein@Senegal(NC_045512@ | 136-158 |
| | | | Senegal: + : 25393-26220) | |
| 4 | 200-204 | ATLQA linker 1-5 | | |
| 4 | 205-216 | AKLLHKPIVWHV | nsp3(NC_045512: + : 2720-8554) | 1165-1176 |
| 4 | 217-221 | ATLQA linker 1-5 | | |
| 4 | 222-234 | SMWALIISVTSNY | nsp6@Aruba(NC_045512@Aruba: + : | 160-172 |
| | | | 10973-11842) | |
| 4 | 235-239 | ATLQA linker 1-5 | | |
| 4 | 240-247 | ARDLSLQF | nsp3(NC_045512: + : 2720-8554) | |
| 4 | 248-252 | ATLQA linker 1-5 | | |
| 4 | 253-281 | FLYIIKLIFLWLLWPVTLACFVLAA | membrane_glycoprotein@Aruba | 45-73 |
| | | VYRI | (NC_045512@Aruba: + : 26523-27191) | |
| 4 | 282-286 | ATLQA linker 1-5 | | |
| 4 | 287-295 | ASQGLLASI | RNA-dependent_RNA_polymerase@ | 771-779 |
| | | | Austria(NC_045512@Austria: + : | |
| | | | 13442-13468 + 13468-16236) | |
| 4 | 296-300 | ATLQA linker 1-5 | | |
| 4 | 301-311 | FFSNVTWFHVS | surface_glycoprotein@Nigeria | 58-68 |
| | | | (NC_045512@Nigeria: + : | |
| | | | 21563-25384) | |
| 4 | 312-316 | ATLQA linker 1-5 | | |
| 4 | 317-325 | TENLLLYID | nsp3(NC_045512: + : 2720-8554) | 432-440 |
| 4 | 326-330 | ATLQA linker 1-5 | | |
| 4 | 331-342 | SVFQSASKIITL | ORF2a_protein@Iceland(NC_045512@ | 54-65 |
| | | | Iceland: + : 25393-26220) | |
| 4 | 343-347 | ATLQA linker 1-5 | | |
| 4 | 348-357 | GNCDVVIGIV | surface_glycoprotein(NC_045512: + : | 1124-1133 |
| | | | 21563-25384) | |
| 4 | 358-362 | ATLQA linker 1-5 | | |
| 4 | 363-383 | HPNCVNCLDDRCILHCANFNV | RNA-dependent_RNA_polymerase@ | 295-315 |
| | | | Australia(NC_045512@Australia: + : | |
| | | | 13442-13468 + 13468-16236) | |
| 4 | 384-388 | ATLQA linker 1-5 | | |
| 4 | 389-398 | ACIDCSARHI | nsp3(NC_045512: + : 2720-8554) | 1872-1881 |
| 4 | 399-403 | ATLQA linker 1-5 | | |
| 4 | 404-418 | TISVTTEILPVSMAK | surface_glycoprotein@Mexico | 719-733 |
| | | | (NC_045512@Mexico: + : | |
| | | | 21563-25384) | |
| 4 | 419-423 | ATLQA linker 1-5 | | |
| 4 | 424-437 | TSACVLAAECTIFK | nsp4(NC_045512: + : 8555-10054) | 147-160 |
| 4 | 438-442 | ATLQA linker 1-5 | | |
| 4 | 443-450 | SINVANYQ | helicase@Mozambique(NC_045512@ | 263-270 |
| | | | @Mozambique: + : 16237-18039) | |
| 4 | 451-455 | ATLQA linker 1-5 | | |
| 4 | 456-465 | EGSVRVVTTG | nsp4(NC_045512: + : 8555-10054) | 207-216 |
| 4 | 466-470 | ATLQA linker 1-5 | | |
| 4 | 471-495 | VLVQSTQWSLFFFFYENAFLPFAMG | nsp6@Iceland(NC_045512@ | 719-733 |
| | | | Iceland: + :10973-11842) | |
| 4 | 496-500 | ATLQA linker 1-5 | | |
| 4 | 501-533 | YEPLTQDHVDILGPLSAQTGIAVLD | 3C-like_proteinase(NC_045512: + : | 239-271 |
| | | MCASLKEL | 10055-10972) | |
| 4 | 534-538 | ATLQA linker 1-5 | | |
| 4 | 539-547 | SRELKVTFF | nsp3(NC_045512: + : 2720-8554) | 1134-1142 |
| 4 | 548-552 | ATLQA linker 1-5 | | |
| 4 | 553-570 | YNLLKDCPAVAKHDFFKF | RNA-dependent_RNA_polymerase@ | 87-104 |
| | | | Aruba(NC_045512@Aruba: + : | |
| | | | 13442-13468 + 13468-16236) | |
| 4 | 571-575 | ATLQA linker 1-5 | | |
| 4 | 576-597 | TLGVLVPHVGEIPVAYRKVLLR | leader_protein(NC_045512: + : | 103-124 |
| | | | 266-805) | |
| 4 | 598-602 | ATLQA linker 1-5 | | |
| 4 | 603-633 | YIWLGFIAGLIAIVMVTIMLCCMTS | surface_glycoprotein@Aruba | 1211-1241 |
| | | CCSCLK | (NC_045512@Aruba: + : | |
| | | | 21563-25384) | |
| 4 | 634-638 | ATLQA linker 1-5 | | |
| 4 | 639-654 | LVDFQVTIAEILLIIM | ORF6_protein(NC_045512: + : | 4-19 |
| | | | 27202-27387) | |
| 4 | 655-659 | ATLQA linker 1-5 | | |
| 4 | 660-671 | TFKVSIWNLDYI | ORF6_protein(NC_045512: + : | 21-32 |
| | | | 27202-27387) | |
| 4 | 672-676 | ATLQA linker 1-5 | | |
| 4 | 677-686 | GVGGKPCIKV | nsp6@Aruba(NC_045512@ | 274-283 |
| | | | Aruba: + :10973-11842) | |
| 4 | 687-691 | ATLQA linker 1-5 | | |
| 4 | 690-716 | SDIDITFLKKDAPYIVGDVVQEGVL | nsp3(NC_045512: + : 2720-8554) | 454-478 |
| 4 | 717-721 | ATLQA linker 1-5 | | |
| 4 | 722-745 | LGSLVVRCSFYEDFLEYHDVRVVL | ORF8_protein(NC_045512: + : | 95-118 |
| | | | 27894-28259) | |
| 4 | 746-750 | ATLQA linker 1-5 | | |
| 4 | 751-763 | ANFCALILAYCNK | nsp3(NC_045512: + : 2720-8554) | 890-902 |
| 4 | 764-768 | ATLQA linker 1-5 | | |
| 4 | 769-794 | YRLANECAQVLSEMVMCGGSLYVKP | RNA-dependent_RNA_polymerase@ | 653-678 |
| | | G | Australia(NC_045512@Australia: + : | |
| | | | 13442-13468 + 13468-16236) | |
| 4 | 795-799 | ATLQA linker 1-5 | | |
| 4 | 800-807 | QIGVVREF | helicase(NC_045512: + : | 492-499 |
| | | | 16237-18039) | |
| 4 | 808-812 | ATLQA linker 1-5 | | |
| 4 | 813-827 | SYFAIGLALYYPSAR | helicase@Austria(NC_045512@ | 289-303 |
| | | | @Austria: + : 16237-18039) | |
| 4 | 828-832 | ATLQA linker 1-5 | | |
| 4 | 833-842 | SFKLKDCVMY | nsp6@Malaysia(NC_045512@ | 107-116 |
| | | | Malaysia: + :10973-11842) | |
| 4 | 843-847 | ATLQA linker 1-5 | | |
| 4 | 848-857 | PRWYFYYLGT | nucleocapsid_phosphoprotein@Aruba | 106-115 |
| | | | (NC_045512@Aruba: + : 28274-29533) | |
| 4 | 858-862 | ATLQA linker 1-5 | | |
| 4 | 863-899 | VAAGLEAPFLYLYALVYFLQSINFV | ORF3a_protein@Aruba(NC_045512@ | 97-133 |
| | | RIIMRLWLCWKC | Aruba: + : 25393-26220) | |
| 4 | 900-904 | ATLQA linker 1-5 | | |
| 4 | 905-916 | SVLLSMQGAVDI | nsp7(NC-4551: + : 11843-12091) | 57-68 |
| 4 | 917-921 | ATLQA linker 1-5 | | |
| 4 | 922-932 | ETTVDIVVFDE | helicase@SmallAsia(NC_045512@ | 365-375 |
| | | | @SmallAsia: + : 16237-18039) | |
| 4 | 933-937 | ATLQA linker 1-5 | | |
| 4 | 938-961 | TYASALWEIQQVVDADSKIVQLSE | nsp8(NC_045512: + : 12092-12685) | 148-171 |
| 4 | 962-966 | ATLQA linker 1-5 | | |
| 4 | 967-977 | VLYQGVNCTEV | surface_glycoprotein@Aruba | 606-616 |
| | | | (NC_045512@Aruba: + : | |
| | | | 21563-25384) | |
| 4 | 978-982 | ATLQA linker 1-5 | | |
| 4 | 983-1005 | TTVMFLARGIVFMCVEYCPIFFI | nsp6@Aruba(NC_045512@ | 177-199 |
| | | | Aruba: + :10973-11842) | |
| 4 | 1006-1010 | ATLQA linker 1-5 | | |
| 4 | 1011-1018 | GVYCCREH | nsp2(NC_045512: + : 806-2719) | 47-54 |
| 4 | 1019-1023 | ATLQA linker 1-5 | | |
| 4 | 1024-1031 | EIYQAGSK | surface_glycoprotein@Mexico | 471-478 |
| | | | (NC_045512@Mexico: + : | |
| | | | 21563-25384) | |
| 4 | 1032-1036 | ATLQA linker 1-5 | | |
| 4 | 1037-1059 | LIAIVMVTIMLCCITSCCSCLKG | surface_glycoprotein@Mozambique | 1220-1242 |
| | | | (NC_045512@Mozambique: + : | |
| | | | 21563-25384) | |
| 4 | 1060-1064 | ATLQA linker 1-5 | | |
| 4 | 1065-1074 | ARDLICAQKF | surface_glycoprotein(NC_045512: + : | 846-855 |
| | | | 21563-25384) | |
| 4 | 1075-1079 | ATLQA linker 1-5 | | |
| 4 | 1080-1092 | NPVLPFNDGVYFA | surface_glycoprotein(NC_045512: + : | 81-93 |
| | | | 21563-25384) | |
| 4 | 1093-1097 | ATLQA linker 1-5 | | |
| 4 | 1098-1114 | VPQEHYVRITGLPTLN | helicase@Aruba(NC_045512@ | 241-257 |
| | | | @Aruba: + : 16237-18039) | |
| 4 | 1115-1119 | ATLQA linker 1-5 | | |
| 4 | 1120-1144 | VLVQSTQWSLFFFLYENAFLPFAMG | nsp6@Aruba(NC_045512@ | 24-48 |
| | | | Aruba: + :10973-11842) | |
| 4 | 1145-1149 | ATLQA linker 1-5 | | |
| 4 | 1150-1161 | HEFCSQHTMLVK | RNA-dependent_RNA_polymerase | 810-821 |
| | | | (NC_04551: + : 13442-13468 + | |
| | | | 13468-16236) | |
| 4 | 1162-1166 | ATLQA linker 1-5 | | |
| 4 | 1167-1185 | AVAVLYQDVNCTEVPVAIH | surface_glycoprotein@China | 607-625 |
| | | | (NC_045512@China: + : | |
| | | | 21563-25384) | |
| 4 | 1186-1190 | ATLQA linker 1-5 | | |
| 4 | 1191-1210 | DDRCILHCANFNVLFSTVFP | RNA-dependent_RNA_polymerase | 303-322 |
| | | | (NC_04551: + : 13442-13468 + | |
| | | | 13468-16236) | |
| 4 | 1211-1512 | ATLQA linker 1-5 | | |
| 4 | 1216-1225 | FEYVSQPFLM | surface_glycoprotein@Aruba | 163-173 |
| | | | (NC_045512@Aruba: + : | |
| | | | 21563-25384) | |
| 4 | 1226-1230 | ATLQA linker 1-5 | | |
| 4 | 1231-1244 | GFNCYFPLQPYGFQ | surface_glycoprotein@ | 481-494 |
| | | | SmallSouthAmerica(NC_045512@ | |
| | | | SmallSouthAmerica: + : 21563-25384) | |
| 4 | 1245-1249 | ATLQA linker 1-5 | | |
| 4 | 1250-1267 | IKVCEFQFCNFPFLGVYH | surface_glycoprotein@Aruba | 125-142 |
| | | | (NC_045512@Aruba: + : | |
| | | | 21563-25384) | |
| 4 | 1268-1272 | ATLQA linker 1-5 | | |
| 4 | 1273-1295 | NHDLYCQVHGNAHVASCDAIMTR | 3′-to-5′_exonuclease(NC_045512: + : | 256-278 |
| | | | 18040-19620) | |
| 4 | 1296-1300 | ATLQA linker 1-5 | | |
| 4 | 1301-1323 | SHGKQVVSDIDYVPLKSATCITR | 3′-to-5′_exonuclease(NC_045512: + : | 454-476 |
| | | | 18040-19620) | |
| 4 | 1324-1328 | ATLQA linker 1-5 | | |
| 4 | 1329-1349 | AVLYQGVNCTEVPFAIHADQL | surface_glycoprotein@SmallAfrica | 605-625 |
| | | | (NC_045512@SmallAfrica: + : | |
| | | | 21563-25384) | |
| 5 | 1-16 | YVRITGLYPTLNISYE | helicase@SmallNorthAmerica | 246-261 |
| | | | (NC_-45512@SmallNorthAmerica: + : | |
| | | | 16237-18039) | |
| 5 | 17-21 | ATLQA linker 1-5 | | |
| 5 | 22-35 | LEKILVTYNCCDDD | RNA-dependent_RNA_polymerase | 142-155 |
| | | | (NC_04551: + : 13442-13468 + | |
| | | | 13468-16236) | |
| 5 | 36-40 | ATLQA linker 1-5 | | |
| 5 | 41-50 | LSVNPYVCNA | helicase@Cyprus(NC_045512@Cyprus: | 43-52 |
| | | | + : 16237-18039) | |
| 5 | 51-55 | ATLQA linker 1-5 | | |
| 5 | 56-65 | ETFVTHSKGL | nsp2(NC_045512: + : 806-2719) | 527-536 |
| 5 | 66-70 | ATLQA linker 1-5 | | |
| 5 | 71-85 | TYACWHHSIGFDYVY | 3′-to-5′_exonuclease(NC_045512: + : | 223-237 |
| | | | 18040-19620) | |
| 5 | 86-90 | ATLQA linker 1-5 | | |
| 5 | 91-101 | AVHECFVKRVD | 3′-to-5′_exonuclease(NC_045512: + : | 281-291 |
| | | | 18040-19620) | |
| 5 | 102-106 | ATLQA linker 1-5 | | |
| 5 | 107-116 | SVELKHFFFA | RNA-dependent_RNA_polymerase | 434-443 |
| | | | (NC_04551: + : 13442-13468 + | |
| | | | 13468-16236) | |
| 5 | 117-121 | ATLQA linker 1-5 | | |
| 5 | 122-135 | TSGVGYQPYRVVVL | surface_glycoprotein@Aruba | 496-509 |
| | | | (NC_045512@Aruba: + : | |
| | | | 21563-25384) | |
| 5 | 136-140 | ATLQA linker 1-5 | | |
| 5 | 141-148 | EVTPSGTS | nucleocapsid_phosphoprotein | 323-330 |
| | | | (NC_045512: + : 28274-29533) | |
| 5 | 149-153 | ATLQA linker 1-5 | | |
| 5 | 154-163 | DVVAIDYKHY | nsp3(NC_045512: + : 2720-8554) | 1148-1157 |
| 5 | 164-168 | ATLQA linker 1-5 | | |
| 5 | 169-176 | NNLVVMAY | nsp2(NC_045512: + : 806-2719) | 413-420 |
| 5 | 177-181 | ATLQA linker 1-5 | | |
| 5 | 182-189 | SSIVITSG | ORF3a_protein@NorthKorea(NC_045512@ | 165-172 |
| | | | NorthKorea: + : 25393-26220) | |
| 5 | 190-194 | ATLQA linker 1-5 | | |
| 5 | 195-233 | GCDVTDVTQLYLGGMSYYCKSHKPP | helicase(NC_045512: + : | 54-92 |
| | | ISFPLCANGQVFGL | 16237-18039) | |
| 5 | 234-238 | ATLQA linker 1-5 | | |
| 5 | 239-246 | DQDVLFAY | RNA-dependent_RNA_polymerase@ | 523-530 |
| | | | FrenchGuiana(NC_045512@FrenchGuiana | |
| | | | : + :13442-13468 + 13468-16236) | |
| 5 | 247-251 | ATLQA linker 1-5 | | |
| 5 | 252-261 | RHSLSHFVNL | nsp3(NC_045512: + : 2720-8554) | 1697-1706 |
| 5 | 262-266 | ATLQA linker 1-5 | | |
| 5 | 267-274 | SVDCTMYI | surface_glycoprotein(NC_04551: + : | 735-742 |
| | | | 21563-25384) | |
| 5 | 275-279 | ATLQA linker 1-5 | | |
| 5 | 280-287 | SDFVRATA | ORF3a_protein(NC_04551: + : | 26-33 |
| | | | 25393-26220) | |
| 5 | 288-292 | ATLQA linker 1-5 | | |
| 5 | 293-304 | FRSSVLHSTRDL | surface_glycoprotein@Nigeria | 43-54 |
| | | | (NC_045512@Nigeria: + : | |
| | | | 21563-25384) | |
| 5 | 305-309 | ATLQA linker 1-5 | | |
| 5 | 310-317 | FKLASHMY | nsp3(NC_045512: + : 2720-8554) | 96-103 |
| 5 | 318-322 | ATLQA linker 1-5 | | |
| 5 | 323-336 | LSPVALRQMSCAAG | nsp9(NC_045512: + : 12686-13024) | 4-17 |
| 5 | 337-341 | ATLQA linker 1-5 | | |
| 5 | 342-360 | AIPINFTISVTTEILPVSM | surface_glycoprotein@Aruba | 709-727 |
| | | | (NC_045512@Aruba: + : | |
| | | | 21563-25384) | |
| 5 | 361-365 | ATLQA linker 1-5 | | |
| 5 | 366-375 | SVLNDILARL | surface_glycoprotein@Aruba | 971-980 |
| | | | (NC_045512@Aruba: + : | |
| | | | 21563-25384) | |
| 5 | 376-380 | ATLQA linker 1-5 | | |
| 5 | 381-394 | RLNVGDYFVLTSHT | helicase@Austria(NC_045512@Austria: | 218-231 |
| | | | + : 16237-18039) | |
| 5 | 395-399 | ATLQA linker 1-5 | | |
| 5 | 400-408 | ISEHDYHIG | ORF3a_protein@NorthMacedonia | 179-187 |
| | | | (NC_045512@NorthMacedonia: + : | |
| | | | 25393-26220) | |
| 5 | 409-413 | ATLQA linker 1-5 | | |
| 5 | 414-421 | STFKCYGV | surface_glycoprotein@Aruba | 371-378 |
| | | | (NC_045512@Aruba: + : | |
| | | | 21563-25384) | |
| 5 | 422-426 | ATLQA linker 1-5 | | |
| 5 | 427-436 | GLGLKDCVMY | nsp6@Peru(NC_045512@Peru: + : | 107-116 |
| | | | 10973-11842) | |
| 5 | 437-441 | ATLQA linker 1-5 | | |
| 5 | 442-449 | SQDLSVVS | endoRNAse(NC_045512: + : | 308-315 |
| | | | 19621-20658) | |
| 5 | 450-454 | ATLQA linker 1-5 | | |
| 5 | 455-468 | GFNCYSPLQSYGFQ | surface_glycoprotein@Peru | 485-498 |
| | | | (NC_045512@Peru: + : | |
| | | | 21563-25384) | |
| 5 | 469-473 | ATLQA linker 1-5 | | |
| 5 | 474-489 | AFKLNIKLLGVGGKPC | nsp6(NC_045512: + : 10973-11842) | 268-283 |
| 5 | 490-494 | ATLQA linker 1-5 | | |
| 5 | 495-502 | DCATVHTA | 2′-O-ribose_methyltransferase | 114-121 |
| | | | (NC_045112: + : 20659-21552) | |
| 5 | 503-507 | ATLQA linker 1-5 | | |
| 5 | 508-518 | SPGVFNPVMEP | ORF3a_protein@Colombia | 252-262 |
| | | | (NC_045512@Colombia: + : | |
| | | | 25393-26220) | |
| 5 | 519-523 | ATLQA linker 1-5 | | |
| 5 | 524-538 | VCNLLLLFVTVYSHL | ORF3a_protein@Croatia | 80-94 |
| | | | (NC_045512@Croatia: + : | |
| | | | 25393-26220) | |
| 5 | 539-543 | ATLQA linker 1-5 | | |
| 5 | 544-585 | TTVAAFHQECSLQSCTQHQPYVVDD | ORF8_protein@Bangladesh | 11-52 |
| | | PCPIHFYSKWYIRVGAR | (NC_045512@Bangladesh: + : | |
| | | | 27894-28259) | |
| 5 | 586-590 | ATLQA linker 1-5 | | |
| 5 | 591-600 | VMCGGSLYVK | RNA-dependent_RNA_polymerase | 667-676 |
| | | | (NC_04551: + : 13442-13468 + | |
| | | | 13468-16236) | |
| 5 | 601-605 | ATLQA linker 1-5 | | |
| 5 | 606-626 | ALCEKALKYFPIDKCSRIIPA | helicase@Colombia(NC_045512@ | 316-336 |
| | | | Colombia: + : 16237-18039) | |
| 5 | 627-631 | ATLQA linker 1-5 | | |
| 5 | 632-648 | KDQVILLNKHIDAYKTF | nucleocapsid_phosphoprotein@Aruba | 347-363 |
| | | | (NC_04551@Aruba: + : 28274-29533) | |
| 5 | 649-653 | ATLQA linker 1-5 | | |
| 5 | 654-666 | KLALGGSVAIKIT | 2′-O-ribose_methyltransferase | 160-172 |
| | | | (NC_045112: + : 20659-21552) | |
| 5 | 667-671 | ATLQA linker 1-5 | | |
| 5 | 672-681 | NLIIKNLSKS | ORF6_protein(NC_045512: + : | 34-43 |
| | | | 27202-27387) | |
| 5 | 682-686 | ATLQA linker 1-5 | | |
| 5 | 687-707 | ELVIGAVILRGHLRIAGHHLG | membrane_glycoprotein@Aruba | 137-157 |
| | | | (NC_045512@Aruba: + : 26523-27191) | |
| 5 | 708-712 | ATLQA linker 1-5 | | |
| 5 | 713-726 | TCFSVAALTNNVAF | RNA-dependent_RNA_polymerase@Aruba | 394-407 |
| | | | (NC_04551@Aruba: + : | |
| | | | 13442-13468 + 13468-16236) | |
| 5 | 727-731 | ATLQA linker 1-5 | | |
| 5 | 732-754 | TIATYCTGSIPCSVCLSGLDSLD | nsp3(NC_045512: + : 2720-8554) | 1459-1481 |
| 5 | 755-759 | ATLQA linker 1-5 | | |
| 5 | 760-773 | TKDVVECLKLSHQS | nsp3(NC_045512: + : 2720-8554) | 1830-1843 |
| 5 | 774-778 | ATLQA linker 1-5 | | |
| 5 | 779-796 | IKDLPKEITVATSRTLSY | membrane_glycoprotein_NC_045512: | 161-178 |
| | | | + : 26523-27191) | |
| 5 | 797-801 | ATLQA linker 1-5 | | |
| 5 | 802-817 | TGLHPTQAPTHLSVDT | 3′-to-5′_exonuclease(NC_045512: + : | 16-31 |
| | | | 18040-19620) | |
| 5 | 818-822 | ATLQA linker 1-5 | | |
| 5 | 823-851 | SMWALIISVTSNYSGVVTIVMFLAR | nsp6@SmallSouthAmerica(NC_045512@ | 160-188 |
| | | GIVF | SmallSouthAmerica: + : | |
| | | | 10973-11842) | |
| 5 | 852-856 | ATLQA linker 1-5 | | |
| 5 | 857-864 | IAANTVIW | endoRNAse(NC_045512: + : | 79-86 |
| | | | 19621-20658) | |
| 5 | 865-869 | ATLQA linker 1-5 | | |
| 5 | 870-878 | SEAFLIGCN | 2′-O-ribose_methyltransferase | 202-210 |
| | | | (NC_045112: + : 20659-21552) | |
| 5 | 879-883 | ATLQA linker 1-5 | | |
| 5 | 884-892 | VTANVNALL | RNA-dependent_RNA_polymerase | 700-708 |
| | | | (NC_04551: + : | |
| | | | 13442-13468 + 13468-16236) | |
| 5 | 893-897 | ATLQA linker 1-5 | | |
| 5 | 898-911 | ESVVKDCVVLHSYF | ORF3a_protein@CostaRica(NC_04551@ | 194-207 |
| | | | CostaRica: + : 25393-26220) | |
| 5 | 912-916 | ATLQA linker 1-5 | | |
| 5 | 917-929 | RSVASQSIIAYTM | surface_glycoprotein@Aruba | 681-693 |
| | | | (NC_045512@Aruba: + : | |
| | | | 21563-25384) | |
| 5 | 930-934 | ATLQA linker 1-5 | | |
| 5 | 935-945 | EQYVFCTVANL | helicase(NC_04551: + : | 353-363 |
| | | | 16237-18039) | |
| 5 | 946-950 | ATLQA linker 1-5 | | |
| 5 | 951-959 | ASQGLVASI | RNA-dependent_RNA_polymerase@Aruba | 771-779 |
| | | | (NC_04551@Aruba: + : | |
| | | | 13442-13468 + 13468-16236) | |
| 5 | 960-964 | ATLQA linker 1-5 | | |
| 5 | 965-980 | QLALSKGFHFVCNLLL | ORF3a_protein@Iceland(NC_04551@ | 70-85 |
| | | | Iceland: + : 25393-26220) | |
| 5 | 981-985 | ATLQA linker 1-5 | | |
| 5 | 986-999 | RLTLGVYDYLVSTQ | nsp6(NC_045512: + : 10973-11842) | 236-249 |
| 5 | 1000-1004 | ATLQA linker 1-5 | | |
| 5 | 1005-1015 | KESVQTFFKLV | nsp2(NC_04551: + : 806-2719) | 492-502 |
| 5 | 1016-1020 | ATLQA linker 1-5 | | |
| 5 | 1021-1043 | VAAGLEAPFFYLYALVYFLQSIN | ORF3a_protein@Ecuador(NC_04551@ | 97-119 |
| | | | Ecuador: + : 25393-26220) | |
| 5 | 1044-1048 | ATLQA linker 1-5 | | |
| 5 | 1049-1070 | SDFVRATATIPIRASLPFGWLI | ORF3a_protein@Belgium(NC_04551@ | 26-47 |
| | | | Belgium: + : 25393-26220) | |
| 5 | 1071-1075 | ATLQA linker 1-5 | | |
| 5 | 1076-1094 | ECAQVLSETVMCGGSLYVK | RNA-dependent_RNA_polymerase@Aruba | 658-676 |
| | | | (NC_04551@Aruba: + : | |
| | | | 13442-13468 + 13468-16236) | |
| 5 | 1095-1099 | ATLQA linker 1-5 | | |
| 5 | 1100-1111 | LKKLKKSLNVAK | nsp8(NC_045512: + : 12092-12685) | 35-46 |
| 5 | 1112-1116 | ATLQA linker 1-5 | | |
| 5 | 1117-1138 | LGGMSYYCKSHKPSISFPLCAN | helicase@NewZealand(NC_045512@ | 65-86 |
| | | | NewZealand: + : 16237-18039) | |
| 5 | 1139-1143 | ATLQA linker 1-5 | | |
| 5 | 1144-1156 | WNVVRIKIVQMLS | 3′-to-5′_exonuclease(NC_045512: + : | 159-171 |
| | | | 18040-19620) | |
| 5 | 1157-1161 | ATLQA linker 1-5 | | |
| 5 | 1162-1177 | FSNVTWFHAIHVSGTN | surface_glycoprotein@Peru | 59-74 |
| | | | (NC_045512@Peru: + : | |
| | | | 21563-25384) | |
| 5 | 1178-1182 | ATLQA linker 1-5 | | |
| 5 | 1183-1199 | SAAYYVGYLQLRTFLLK | surface_glycoprotein@Italy | 258-274 |
| | | | (NC_045512@Italy: + : | |
| | | | 21563-25384) | |
| 5 | 1200-1204 | ATLQA linker 1-5 | | |
| 5 | 1205-1220 | NYTVSCSPFTINCQEP | ORF8_protein@CostaRica(NC_045512@ | 78-93 |
| | | | CostaRica: + : 27894-28259) | |
| 5 | 1221-1225 | ATLQA linker 1-5 | | |
| 5 | 1226-1240 | YFTSDYYQLYSTQLI | ORF8_protein@Indonesia(NC_045512@ | 206-220 |
| | | | Indonesia: + : 27894-28259) | |
| 5 | 1241-1245 | ATLQA linker 1-5 | | |
| 5 | 1246-1260 | RIIPARAVECFDKF | helicase@Aruba(NC_045512@ | 332-346 |
| | | | Aruba: + : 16237-18039) | |
| 5 | 1261-1265 | ATLQA linker 1-5 | | |
| 5 | 1266-1275 | DGYVMHANYI | 2′-O-ribose_methyltransferase | 220-229 |
| | | | (NC_045112: + : 20659-21552) | |
| 5 | 1276-1280 | ATLQA linker 1-5 | | |
| 5 | 1281-1294 | SYLFQHANLDSCKR | nsp3(NC_045512: + : 2720-8554) | 915-928 |
| 5 | 1295-1299 | ATLQA linker 1-5 | | |
| 5 | 1300-1308 | EVFAQVKQI | surface_glycoprotein(NC_04551: + : | 780-788 |
| | | | 21563-25384) | |
| 5 | 1309-1313 | ATLQA linker 1-5 | | |
| 5 | 1314-1329 | FLVLLPLVSIQCVNLT | surface_glycoprotein@ | 4-19 |
| | | | SmallNorthAmerica(NC_04551@ | |
| | | | SmallNorthAmerica: + : | |
| | | | 21563-25384) | |
| 5 | 1330-1334 | ATLQA linker 1-5 | | |
| 5 | 1335-1349 | YNLLKGCPAVAKHDF | RNA-dependent_RNA_polymerase@Poland | 87-101 |
| | | | (NC_04551@Poland: + : | |
| | | | 13442-13468 + 13468-16236) | |
| 6 | 1-11 | GKPVPYCYDTN | nsp4(NC_04551: + : 8555-10054) | 164-174 |
| 6 | 12-16 | ATLQA linker 1-5 | | |
| 6 | 17-33 | EVTPSGTWLTYTGAIKL | nucleocapsid_phosphoprotein@ | 323-339 |
| | | | Bulgaria(NC_04551@Bulgaria: + : | |
| | | | 28274-29533) | |
| 6 | 34-38 | ATLQA linker 1-5 | | |
| 6 | 39-60 | INLVRDLPQGFSALEPLVDLPI | surface_glycoprotein@Aruba | 206-227 |
| | | | (NC_045512@Aruba: + : | |
| | | | 21563-25384) | |
| 6 | 61-65 | ATLQA linker 1-5 | | |
| 6 | 66-76 | YDNLQFISLEI | helicase@Austria(NC_045512@ | 582-592 |
| | | | Austria: + : 16237-18039) | |
| 6 | 77-81 | ATLQA linker 1-5 | | |
| 6 | 82-103 | SDFVRATATIPIQASLPFGWLI | ORF3a_protein@Aruba(NC_04551@ | 26-47 |
| | | | Aruba: + : 25393-26220) | |
| 6 | 104-108 | ATLQA linker 1-5 | | |
| 6 | 109-116 | PVLKGVKL | surface_glycoprotein@Aruba | 1259-1266 |
| | | | (NC_045512@Aruba: + : | |
| | | | 21563-25384) | |
| 6 | 117-121 | ATLQA linker 1-5 | | |
| 6 | 122-131 | NVAFNVVNKG | endoRNAase(NC_045512: + : | 4-13 |
| | | | 19621-20658) | |
| 6 | 132-136 | ATLQA linker 1-5 | | |
| 6 | 137-153 | CSNLLLQYGSFCTQLNR | surface_glycoprotein(NC_04551: + : | 749-765 |
| | | | 21563-25384) | |
| 6 | 154-158 | ATLQA linker 1-5 | | |
| 6 | 159-167 | SPDVDLADI | surface_glycoprotein@Chile | 1161-1169 |
| | | | (NC_045512@Chile: + : | |
| | | | 21563-25384) | |
| 6 | 168-172 | ATLQA linker 1-5 | | |
| 6 | 173-187 | SYELQTPFEIKLAKK | nsp2(NC_045512: + : 806-2719) | 68-82 |
| 6 | 188-192 | ATLQA linker 1-5 | | |
| 6 | 193-204 | NIGCNHTGVVGE | nsp2(NC_045512: + : 806-2719) | 250-261 |
| 6 | 205-209 | ATLQA linker 1-5 | | |
| 6 | 210-221 | VRTNVYLAVFDK | nsp3(NC_045512: + : 2720-8554) | 351-362 |
| 6 | 222-226 | ATLQA linker 1-5 | | |
| 6 | 227-242 | ANSIVCRFDTRVLSNL | 3′-to-5′_exonuclease(NC_045512: + : | 394-409 |
| | | | 18040-19620) | |
| 6 | 243-247 | ATLQA linker 1-5 | | |
| 6 | 248-260 | ATNVVIKVCEFQF | surface_glycoprotein(NC_04551: + : | 123-135 |
| | | | 21563-25384) | |
| 6 | 261-265 | ATLQA linker 1-5 | | |
| 6 | 266-287 | QLALSKGVHFVCNLLLLFVTVY | ORF3a_protein@Australia(NC_04551@ | 70-91 |
| | | | Australia: + : 25393-26220) | |
| 6 | 288-292 | ATLQA linker 1-5 | | |
| 6 | 293-308 | HWPQIAQFAPSASAFF | nucleocapsid_phosphoprotein@ | 300-315 |
| | | | Aruba(NC_04551@Aruba: + : | |
| | | | 28274-29533) | |
| 6 | 309-313 | ATLQA linker 1-5 | | |
| 6 | 314-321 | RVEAFEYY | nsp3(NC_045512: + : 2720-8554) | 810-817 |
| 6 | 322-326 | ATLQA linker 1-5 | | |
| 6 | 327-343 | ILLNKHIDAYKTFPPIE | nucleocapsid_phosphoprotein@ | 351-367 |
| | | | Chile(NC_04551@Chile: + : | |
| | | | 28274-29533) | |
| 6 | 344-348 | ATLQA linker 1-5 | | |
| 6 | 349-357 | KFPLKLRGT | 2′-O-ribose_methyltransferase | 249-257 |
| | | | (NC_045112: + : 20659-21552) | |
| 6 | 358-362 | ATLQA linker 1-5 | | |
| 6 | 363-372 | NCYDYCIPYN | ORF3a_protein(NC_045512: + : | 152-161 |
| | | | 25393-26220_ | |
| 6 | 373-377 | ATLQA linker 1-5 | | |
| 6 | 378-391 | GASCCLYCRCHIDH | nsp10(NC_045512: + :13025-13441) | 70-83 |
| 6 | 392-396 | ATLQA linker 1-5 | | |
| 6 | 397-406 | VQQESPFVMM | nsp3(NC_045512: + : 2720-8554) | 980-989 |
| 6 | 407-411 | ATLQA linker 1-5 | | |
| 6 | 412-422 | CLPFTINCQKP | ORF8_protein@Brazil(NC_04551@ | 83-93 |
| | | | Brazil: + : 27894-28259) | |
| 6 | 423-427 | ATLQA linker 1-5 | | |
| 6 | 428-450 | KEITVATSRTLSYYKLGASQRVA | membrane_glycoprotein@Aruba | 166-188 |
| | | | (NC_045512@Aruba: + : | |
| | | | 26523-27191) | |
| 6 | 451-455 | ATLQA linker 1-5 | | |
| 6 | 456-466 | VVNAANVYLKH | nsp3(NC_045512: + : 2720-8554) | 239-249 |
| 6 | 467-471 | ATLQA linker 1-5 | | |
| 6 | 472-484 | AIKCVPQADVEWK | 3′-to-5′_exonuclease(NC_045512: + : | 337-349 |
| | | | 18040-19620) | |
| 6 | 485-489 | ATLQA linker 1-5 | | |
| 6 | 590-506 | LFFFLYENAFLPFVMGI | nsp6@SmallSouthAmerica(NC_045512@ | 33-49 |
| | | | SmallSouthAmerica: + : | |
| | | | 10973-11842) | |
| 6 | 507-511 | ATLQA linker 1-5 | | |
| 6 | 512-522 | YDKLQFTSLEI | helicase@Aruba(NC_045512@ | 582-592 |
| | | | Aruba: + : 16237-18039) | |
| 6 | 523-527 | ATLQA linker 1-5 | | |
| 6 | 528-535 | SSNVANYQ | helicase@Austria(NC_045512@ | 263-270 |
| | | | Austria: + : 16237-18039) | |
| 6 | 536-540 | ATLQA linker 1-5 | | |
| 6 | 541-565 | AAGLEAPFLYLYVLVYFLQSINFVR | ORF3a_protein@Norway(NC_04551@ | 98-122 |
| | | | Norway: + : 25393-26220) | |
| 6 | 566-570 | ATLQA linker 1-5 | | |
| 6 | 571-585 | RTCCLCDRRATCFST | 3′-to-5′_exonuclease(NC_045512: + : | 205-219 |
| | | | 18040-19620) | |
| 6 | 586-590 | ATLQA linker 1-5 | | |
| 6 | 591-605 | ERFVSLAIDAYPLTK | RNA-dependent_RNA_polymerase | 857-871 |
| | | | (NC_04551: + : | |
| | | | 13442-13468 + 13468-16236) | |
| 6 | 606-610 | ATLQA linker 1-5 | | |
| 6 | 611-618 | VLSEARQH | leader_protein(NC_045512: + : | 38-45 |
| | | | 266-805) | |
| 6 | 619-623 | ATLQA linker 1-5 | | |
| 6 | 624-637 | SVASQSIIAYTMSL | surface_glycoprotein@Austria | 678-691 |
| | | | (NC_045512@Austria: + : | |
| | | | 21563-25384) | |
| 6 | 638-642 | ATLQA linker 1-5 | | |
| 6 | 643-660 | KGFCDLKGKYVQIPTTCA | nsp10(NC_045512: + : 13025-13441) | 87-104 |
| 6 | 661-665 | ATLQA linker 1-5 | | |
| 6 | 666-675 | GVITHDVSSA | helicase(NC_045512: + : | 478-487 |
| | | | 16237-18039) | |
| 6 | 676-680 | ATLQA linker 1-5 | | |
| 6 | 681-702 | IAMACLVGLMWLSYFIASFRLF | membrane_glycoprotein@Aruba | 82-103 |
| | | | (NC_045512@Aruba: + : | |
| | | | 26523-27191) | |
| 6 | 703-707 | ATLQA linker 1-5 | | |
| 6 | 708-717 | TPLIQPIGAL | nsp4(NC_045512: + : 8555-10054) | 269-278 |
| 6 | 718-722 | ATLQA linker 1-5 | | |
| 6 | 723-736 | IHFYSKWYIRVGAK | ORF8_protein@Mozambique(NC_04551@ | 39-52 |
| | | | Mozambique: + : 27894-28259) | |
| 6 | 737-741 | ATLQA linker 1-5 | | |
| 6 | 742-751 | LPRVFSAVGN | nsp4(NC_045512: + : 8555-10054) | 122-131 |
| 6 | 752-756 | ATLQA linker 1-5 | | |
| 6 | 757-774 | SQHTMLVKQGDDYVYLPY | RNA-dependent_RNA_polymerase@Aruba | 814-831 |
| | | | (NC_04551@Aruba: + : | |
| | | | 13442-13468 + 13468-16236) | |
| 6 | 775-779 | ATLQA linker 1-5 | | |
| 6 | 780-805 | YRLANECAQVLSEIVMCGGSLYVKP | RNA-dependent_RNA_polymerase@ | 653-678 |
| | | G | Canada(NC_04551@Canada: + : | |
| | | | 13442-13468 + 13468-16236) | |
| 6 | 806-810 | ATLQA linker 1-5 | | |
| 6 | 811-828 | CANFNVLFSTVFPPTSFG | RNA-dependent_RNA_polymerase@ | 310-327 |
| | | | China(NC_04551@China: + : | |
| | | | 13442-13468 + 13468-16236) | |
| 6 | 829-833 | ATLQA linker 1-5 | | |
| 6 | 834-845 | DTSLKLKECVMY | nsp6@SmallAsia(NC_045512@ | 102-113 |
| | | | SmallAsia: + : 10973-11842) | |
| 6 | 846-850 | ATLQA linker 1-5 | | |
| 6 | 851-866 | FRELGVVHNQDVNLHS | RNA-dependent_RNA_polymerase | 348-363 |
| | | | (NC_04551: + : | |
| | | | 13442-13468 + 13468-16236) | |
| 6 | 867-871 | ATLQA linker 1-5 | | |
| 6 | 872-880 | MPVCVETKA | nsp3(NC_045512: + : 2720-8554) | 571-579 |
| 6 | 881-885 | ATLQA linker 1-5 | | |
| 6 | 886-901 | SEFSSLPSYAAFATAQ | nsp8(NC_045512: + : 12092-12685) | 4-19 |
| 6 | 902-906 | ATLQA linker 1-5 | | |
| 6 | 907-922 | EEIIYNLLKDCPAVAK | RNA-dependent_RNA_polymerase@ | 83-98 |
| | | | Senegal(NC_04551@Senegal: + : | |
| | | | 13442-13468 + 13468-16236) | |
| 6 | 923-927 | ATLQA linker 1-5 | | |
| 6 | 928-940 | VKGLQPSVGPKQA | endoRNAse(NC_04512: + : | 148-160 |
| | | | 19621-20658) | |
| 6 | 941-645 | ATLQA linker 1-5 | | |
| 6 | 946-961 | TVLKKCKSAFYILPSI | nsp3(NC_045512: + : 2720-8554) | 626-541 |
| 6 | 962-966 | ATLQA linker 1-5 | | |
| 6 | 967-980 | DGCVPLNIIPLTTA | nsp8(NC_045512: + : 12092-12685) | 112-125 |
| 6 | 981-985 | ATLQA linker 1-5 | | |
| 6 | 986-1003 | FLYENAFPFAMGVIAMS | nsp6@Mexico(NC_045512@ | 36-53 |
| | | | Mexico: + : 10973-11842) | |
| 6 | 1004-1008 | ATLQA linker 1-5 | | |
| 6 | 1009-1016 | TQALPHRQ | nucleocapsid_phosphoprotein@ | 379-386 |
| | | | Mozambique(NC_04551@Mozambique: + : | |
| | | | 28274-29533) | |
| 6 | 1017-1021 | ATLQA linker 1-5 | | |
| 6 | 1022-1040 | DKSAFVNLKQLPFFYYSDS | 3′-to-5′_exonuclease(NC_045512: + : | 432-450 |
| | | | 18040-19620) | |
| 6 | 1041-1045 | ATLQA linker 1-5 | | |
| 6 | 1046-1061 | LQSLQTYVTQQLIRAA | surface_glycoprotein(NC_04551: + : | 1001-1016 |
| | | | 21563-25384) | |
| 6 | 1062-1066 | ATLQA linker 1-5 | | |
| 6 | 1067-1086 | FPQSAPHGVVFLHVTYVPAQ | surface_glycoprotein@Aruba | 1048-1067 |
| | | | (NC_045512@Aruba: + : | |
| | | | 21563-25384) | |
| 6 | 1087-1091 | ATLQA linker 1-5 | | |
| 6 | 1092-1101 | ISDYDYYRYN | RNA-dependent_RNA_polymerase@ | 450-459 |
| | | | Aruba(NC_04551@Aruba: + : | |
| | | | 13442-13468 + 13468-16236) | |
| 6 | 1102-1106 | ATLQA linker 1-5 | | |
| 6 | 1107-1114 | SLIDLQEL | surface_glycoprotein(NC_04551: + : | 1196-1203 |
| | | | 21563-25384) | |
| 6 | 1115-1119 | ATLQA linker 1-5 | | |
| 6 | 1120-1130 | SELVIGAVILR | membrane_glycoprotein(NC_045512: + | 136-146 |
| | | | : 26523-27191) | |
| 6 | 1131-1135 | ATLQA linker 1-5 | | |
| 6 | 1136-1154 | VKDCVLLHSYFTSDYYQLY | ORF3a_protein@Belgium(NC_04551@ | 197-215 |
| | | | Belgium: + : 25393-26220) | |
| 6 | 1155-1159 | ATLQA linker 1-5 | | |
| 6 | 1160-1168 | TEIYQAGST | surface_glycoprotein@Aruba | 466-474 |
| | | | (NC_045512@Aruba: + : | |
| | | | 21563-25384) | |
| 6 | 1169-1173 | ATLQA linker 1-5 | | |
| 6 | 1174-1188 | HYVRITGLYPTLNIL | helicase@Indonesia(NC_045512@ | 245-259 |
| | | | Indonesia: + : 16237-18039) | |
| 6 | 1189-1193 | ATLQA linker 1-5 | | |
| 6 | 1194-1207 | FFSNVTWFHAIHVS | surface_glycoprotein@Bangladesh | 58-71 |
| | | | (NC_045512@Bangladesh: + : | |
| | | | 21563-25384) | |
| 6 | 1208-1212 | ATLQA linker 1-5 | | |
| 6 | 1213-1220 | GSCGSVGF | 3C-like_proteinase(NC_045512: + : | 143-150 |
| | | | 10055-10972) | |
| 6 | 1221-1225 | ATLQA linker 1-5 | | |
| 6 | 1226-1234 | KHWPQIAQF | nucleocapsid_phosphoprotein | 299-307 |
| | | | (NC_045512: + : 28274-29533) | |
| 6 | 1235-1239 | ATLQA linker 1-5 | | |
| 6 | 1240-1254 | AYYVGYLQPRTFLLK | surface_glycoprotein@Aruba | 260-274 |
| | | | (NC_045512@Aruba: + : | |
| | | | 21563-25384) | |
| 6 | 1255-1259 | ATLQA linker 1-5 | | |
| 6 | 1260-1268 | YGIIWVATE | nucleocapsid_phosphoprotein@ | 128-136 |
| | | | SmallSouthAmerica(NC_045512@ | |
| | | | SmallSouthAmerica: + : | |
| | | | 28274-29533) | |
| 6 | 1269-1273 | ATLQA linker 1-5 | | |
| 6 | 1274-1281 | EHVQIHTI | ORF3a_protein(NC_04551: + : | 242-249 |
| | | | 25393-26220) | |
| 6 | 1282-1286 | ATLQA linker 1-5 | | |
| 6 | 1287-1301 | EFQFCNDPFLGVYYH | surface_glycoprotein@Chile | 132-146 |
| | | | (NC_045512@Chile: + : | |
| | | | 21563-25384) | |
| 6 | 1302-1306 | ATLQA linker 1-5 | | |
| 6 | 1307-1320 | LVLLPLVSSQCVNF | surface_glycoprotein@Brazil | 5-18 |
| | | | (NC_045512@Brazil: + : | |
| | | | 21563-25384) | |
| 6 | 1321-1325 | ATLQA linker 1-5 | | |
| 6 | 1326-1335 | KQYGDCLGDI | surface_glycoprotein(NC_04551: + : | 835-844 |
| | | | 21563-25384) | |

[0090] In certain embodiments, the vaccine comprises or expresses at least one of the concatemers of epitopes from SARS-COV-2 with intervening linker sequences (and as set forth in FIG. 15). In certain embodiments, the vaccine comprises or expresses at least two of the concatemers set forth below. In certain embodiments, the vaccine comprises or expresses three of the concatemers set forth below. In certain embodiments, the vaccine comprises or expresses four of the concatemers set forth below. In certain embodiments, the vaccine comprises or expresses five of the concatemers set forth below. In certain embodiments, the vaccine comprises or expresses all the concatemers set forth below.

TABLE 5

| | pos_in_ | | | pos_in_ |
|---|---|---|---|---|
| concatemers | concatemer | epitope | gene | gene |
| 1 | 1-12 | NIGCNHTGVVGE | nsp2(NC_045512:+:806-2719) | 250-261 |
| 1 | 13-17 | ATLQA | linker | 1-5 |
| 1 | 18-34 | CSNLLLQYGSFCTQLNR | surface_glycoprotein(NC_045512:+: | 749-765 |
| | | | 21563-25384) | |
| 1 | 35-39 | ATLQA | linker | 1-5 |
| 1 | 40-52 | GVNLVAVPTGYVD | 3′-to-5′_exonuclease(NC_045512:+: | 114-126 |
| | | | 18040-19620) | |
| 1 | 53-57 | ATLQA | linker | 1-5 |
| 1 | 58-69 | ISVTTEILPVSM | surface_glycoprotein(NC_045512:+: | 720-731 |
| | | | 21563-25384) | |
| 1 | 70-74 | ATLQA | linker | 1-5 |
| 1 | 75-89 | INAACRKVQHMVVKA | 3′-to-5′_exonuclease(NC_045512:+: | 305-319 |
| | | | 18040-19620) | |
| 1 | 90-94 | ATLQA | linker | 1-5 |
| 1 | 95-104 | ARDLICAQKF | surface_glycoprotein(NC_045512:+: | 846-855 |
| | | | 21563-25384) | |
| 1 | 105-109 | ATLQA | linker | 1-5 |
| 1 | 110-119 | KACVEEVTTT | nsp3(NC_045512:+:2720-8554) | 415-424 |
| 1 | 120-124 | ATLQA | linker | 1-5 |
| 1 | 125-140 | RKIFVDGVPFVVSTGY | RNA-dependent_RNA_polymerase(NC_045512:+: | 331-346 |
| | | | 13442-13468+13468-16236) | |
| 1 | 141-145 | ATLQA | linker | 1-5 |
| 1 | 146-161 | FRELGVVHNQDVNLHS | RNA-dependent_RNA_polymerase(NC_045512:+: | 348-363 |
| | | | 13442-13468+13468-16236) | |
| 1 | 162-166 | ATLQA | linker | 1-5 |
| 1 | 167-177 | SELVIGAVILR | membrane_glycoprotein(NC_045512:+: | 136-146 |
| | | | 26523-27191) | |
| 1 | 178-182 | ATLQA | linker | 1-5 |
| 1 | 183-194 | VRTNVYLAVFDK | nsp3(NC_045512:+:2720-8554) | 351-362 |
| 1 | 195-199 | ATLQA | linker | 1-5 |
| 1 | 200-218 | KLNVGDYFVLTSHTVMPLS | helicase(NC_045512:+:16237-18039) | 218-236 |
| 1 | 219-223 | ATLQA | linker | 1-5 |
| 1 | 224-236 | KASCTLSEQLDFI | nsp2(NC_045512:+:806-2719) | 30-42 |
| 1 | 237-241 | ATLQA | linker | 1-5 |
| 1 | 242-249 | IETISLAG | nsp3(NC_045512:+:2720-8554) | 684-691 |
| 1 | 250-254 | ATLQA | linker | 1-5 |
| 1 | 255-268 | SYLFQHANLDSCKR | nsp3(NC_045512:+:2720-8554) | 915-928 |
| 1 | 269-273 | ATLQA | linker | 1-5 |
| 1 | 274-287 | FGTVYEKLKPVLDW | nsp2(NC_045512:+:806-2719) | 437-450 |
| 1 | 288-292 | ATLQA | linker | 1-5 |
| 1 | 293-308 | LQSLQTYVTQQLIRAA | surface_glycoprotein(NC_045512:+: | 1001-1016 |
| | | | 21563-25384) | |
| 1 | 309-313 | ATLQA | linker | 1-5 |
| 1 | 314-325 | SSPDAVTAYNGY | nsp3(NC_045512:+:2720-8554) | 660-671 |
| 1 | 326-330 | ATLQA | linker | 1-5 |
| 1 | 331-342 | VTMPLGYVTHGL | nsp3(NC_045512:+:2720-8554) | 628-639 |
| 1 | 343-347 | ATLQA | linker | 1-5 |
| 1 | 348-356 | TENLLLYID | nsp3(NC_045512:+:2720-8554) | 432-440 |
| 1 | 357-361 | ATLQA | linker | 1-5 |
| 1 | 362-373 | VPVVDSYYSLLM | RNA-dependent_RNA_polymerase(NC_045512:+: | 231-242 |
| | | | 13442-13468+13468-16236) | |
| 1 | 374-378 | ATLQA | linker | 1-5 |
| 1 | 379-386 | PEHSLAEY | nsp2(NC_045512:+:806-2719) | 200-207 |
| 1 | 387-391 | ATLQA | linker | 1-5 |
| 1 | 392-401 | NYQCGHYKHI | nsp3(NC_045512:+:2720-8554) | 1012-1021 |
| 1 | 402-406 | ATLQA | linker | 1-5 |
| 1 | 407-425 | DKSAFVNLKQLPFFYYSDS | 3′-to-5′_exonuclease(NC_045512:+: | 432-450 |
| | | | 18040-19620) | |
| 1 | 426-430 | ATLQA | linker | 1-5 |
| 1 | 431-448 | LFVVEVVDKYFDCYDGGC | RNA-dependent_RNA_polymerase(NC_045512:+: | 470-487 |
| | | | 13442-13468+13468-16236) | |
| 2 | 1-13 | AFASEAARVVRSI | nsp2(NC_045512:+:806-2719) | 355-367 |
| 2 | 14-18 | ATLQA | linker | 1-5 |
| 2 | 19-32 | SDRVVFVLWAHGFE | 3′-to-5′_exonuclease(NC_045512:+: | 178-191 |
| | | | 18040-19620) | |
| 2 | 33-37 | ATLQA | linker | 1-5 |
| 2 | 38-45 | MADLVYAL | RNA-dependent_RNA_polymerase(NC_045512:+: | 124-131 |
| | | | 13442-13468+13468-16236) | |
| 2 | 46-50 | ATLQA | linker | 1-5 |
| 2 | 51-60 | KQYGDCLGDI | surface_glycoprotein(NC_045512:+: | 835-844 |
| | | | 21563-25384) | |
| 2 | 61-65 | ATLQA | linker | 1-5 |
| 2 | 66-73 | FTGCVIAW | surface_glycoprotein(NC_045512:+: | 429-436 |
| | | | 21563-25384) | |
| 2 | 74-78 | ATLQA | linker | 1-5 |
| 2 | 79-86 | YDPLQPEL | surface_glycoprotein(NC_045512:+: | 1138-1145 |
| | | | 21563-25384) | |
| 2 | 87-91 | ATLQA | linker | 1-5 |
| 2 | 92-111 | DDRCILHCANFNVLFSTVFP | RNA-dependent_RNA_polymerase(NC_045512:+: | 303-322 |
| | | | 13442-13468+13468-16236) | |
| 2 | 112-116 | ATLQA | linker | 1-5 |
| 2 | 117-136 | GYLPQNAVVKIYCPACHNSE | nsp2(NC_045512:+:806-2719) | 178-197 |
| 2 | 137-141 | ATLQA | linker | 1-5 |
| 2 | 142-153 | HEFCSQHTMLVK | RNA-dependent_RNA_polymerase(NC_045512:+: | 810-821 |
| | | | 13442-13468+13468-16236) | |
| 2 | 154-158 | ATLQA | linker | 1-5 |
| 2 | 159-172 | EGVVDYGARFYFYT | nsp3(NC_045512:+:2720-8554) | 595-608 |
| 2 | 173-177 | ATLQA | linker | 1-5 |
| 2 | 178-189 | IEVQGYKSVNIT | nsp3(NC_045512:+:2720-8554) | 13-24 |
| 2 | 190-194 | ATLQA | linker | 1-5 |
| 2 | 195-207 | AIKCVPQADVEWK | 3′-to-5′_exonuclease(NC_045512:+: | 337-349 |
| | | | 18040-19620) | |
| 2 | 208-212 | ATLQA | linker | 1-5 |
| 2 | 213-235 | SHGKQVVSDIDYVPLKSATCITR | 3′-to-5′_exonuclease(NC_045512:+: | 454-476 |
| | | | 18040-19620) | |
| 2 | 236-240 | ATLQA | linker | 1-5 |
| 2 | 241-253 | ANFCALILAYCNK | nsp3(NC_045512:+:2720-8554) | 890-902 |
| 2 | 254-258 | ATLQA | linker | 1-5 |
| 2 | 259-268 | SVELKHFFFA | RNA-dependent_RNA_polymerase(NC_045512:+: | 434-443 |
| | | | 13442-13468+13468-16236) | |
| 2 | 269-273 | ATLQA | linker | 1-5 |
| 2 | 274-284 | KGVQIPCTCGK | nsp3(NC_045512:+:2720-8554) | 963-973 |
| 2 | 285-289 | ATLQA | linker | 1-5 |
| 2 | 290-307 | IKDLPKEITVATSRTLSY | membrane_glycoprotein(NC_045512:+: | 161-178 |
| | | | 26523-27191) | |
| 2 | 308-312 | ATLQA | linker | 1-5 |
| 2 | 313-327 | SYELQTPFEIKLAKK | nsp2(NC_045512:+:806-2719) | 68-82 |
| 2 | 328-332 | ATLQA | linker | 1-5 |
| 2 | 333-346 | TKDVVECLKLSHQS | nsp3(NC_045512:+:2720-8554) | 1830-1843 |
| 2 | 347-351 | ATLQA | linker | 1-5 |
| 2 | 352-359 | ISNCVADY | surface_glycoprotein(NC_045512:+: | 358-365 |
| | | | 21563-25384) | |
| 2 | 360-364 | ATLQA | linker | 1-5 |
| 2 | 365-379 | RTCCLCDRRATCFST | 3′-to-5′_exonuclease(NC_045512:+: | 205-219 |
| | | | 18040-19620) | |
| 2 | 380-384 | ATLQA | linker | 1-5 |
| 2 | 385-393 | EVFAQVKQI | surface_glycoprotein(NC_045512:+: | 780-788 |
| | | | 21563-25384) | |
| 2 | 394-398 | ATLQA | linker | 1-5 |
| 2 | 399-409 | AVHECFVKRVD | 3′-to-5′_exonuclease(NC_045512:+: | 281-291 |
| | | | 18040-19620) | |
| 2 | 410-414 | ATLQA | linker | 1-5 |
| 2 | 415-423 | MPVCVETKA | nsp3(NC_045512:+:2720-8554) | 571-579 |
| 2 | 424-428 | ATLQA | linker | 1-5 |
| 2 | 429-436 | SVDCTMYI | surface_glycoprotein(NC_045512:+: | 735-742 |
| | | | 21563-25384) | |
| 2 | 437-441 | ATLQA | linker | 1-5 |
| 2 | 442-449 | AALQIPFA | surface_glycoprotein(NC_045512:+: | 892-899 |
| | | | 21563-25384) | |
| 3 | 1-10 | ETFVTHSKGL | nsp2(NC_045512:+:806-2719) | 527-536 |
| 3 | 11-15 | ATLQA | linker | 1-5 |
| 3 | 16-32 | AQSFLNRVCGVSAARLT | RNA-dependent_RNA_polymerase(NC_045512:+: | 4-20 |
| | | | 13442-13468+13468-16236) | |
| 3 | 33-37 | ATLQA | linker | 1-5 |
| 3 | 38-53 | GSNVFQTRAGCLIGAE | surface_glycoprotein(NC_045512:+: | 639-654 |
| | | | 21563-25384) | |
| 3 | 54-58 | ATLQA | linker | 1-5 |
| 3 | 59-67 | AGFSLWVYK | 3′-to-5′_exonuclease(NC_045512:+: | 504-512 |
| | | | 18040-19620) | |
| 3 | 68-72 | ATLQA | linker | 1-5 |
| 3 | 73-81 | YDLSVVNAR | helicase(NC_045512:+:16237-18039) | 382-390 |
| 3 | 82-86 | ATLQA | linker | 1-5 |
| 3 | 87-101 | FSVAALTNNVAFQTV | RNA-dependent_RNA_polymerase(NC_045512:+: | 396-410 |
| | | | 13442-13468+13468-16236) | |
| 3 | 102-106 | ATLQA | linker | 1-5 |
| 3 | 107-114 | PSFLGRYM | nsp3(NC_045512:+:2720-8554) | 822-829 |
| 3 | 115-119 | ATLQA | linker | 1-5 |
| 3 | 120-139 | SEAVEAPLVGTPVCINGLML | nsp2(NC_045512:+:806-2719) | 591-610 |
| 3 | 140-144 | ATLQA | linker | 1-5 |
| 3 | 145-157 | IVKFISTCACEIV | nsp2(NC_045512:+:806-2719) | 468-480 |
| 3 | 158-162 | ATLQA | linker | 1-5 |
| 3 | 163-177 | ERFVSLAIDAYPLTK | RNA-dependent_RNA_polymerase(NC_045512:+: | 857-871 |
| | | | 13442-13468+13468-16236) | |
| 3 | 178-182 | ATLQA | linker | 1-5 |
| 3 | 183-192 | NEFYAYLRKH | RNA-dependent_RNA_polymerase(NC_045512:+: | 743-752 |
| | | | 13442-13468+13468-16236) | |
| 3 | 193-197 | ATLQA | linker | 1-5 |
| 3 | 198-209 | AKLLHKPIVWHV | nsp3(NC_045512:+:2720-8554) | 1165-1176 |
| 3 | 210-214 | ATLQA | linker | 1-5 |
| 3 | 215-237 | TIATYCTGSIPCSVCLSGLDSLD | nsp3(NC_045512:+:2720-8554) | 1459-1481 |
| 3 | 238-242 | ATLQA | linker | 1-5 |
| 3 | 243-259 | YADVFHLYLQYIRKLHD | RNA-dependent_RNA_polymerase(NC_045512:+: | 877-893 |
| | | | 13442-13468+13468-16236) | |
| 3 | 260-264 | ATLQA | linker | 1-5 |
| 3 | 265-274 | VMCGGSLYVK | RNA-dependent_RNA_polymerase(NC_045512:+: | 667-676 |
| | | | 13442-13468+13468-16236) | |
| 3 | 275-279 | ATLQA | linker | 1-5 |
| 3 | 280-294 | QIELKFNPPALQDAY | nsp3(NC_045512:+:2720-8554) | 867-881 |
| 3 | 295-299 | ATLQA | linker | 1-5 |

| | | | | |
|---|---|---|---|---|
| 3 | 300-319 | YVYLPYPDPSRILGAGCFVD | RNA-dependent_RNA_polymerase(NC_045512:+: | 826-845 |
| | | | 13442-13468+13468-16236) | |
| 3 | 320-324 | ATLQA | linker | 1-5 |
| 3 | 325-347 | RVDFCGKGYHLMSFPQSAPHGVV | surface_glycoprotein(NC_045512:+: | 1039-1061 |
| | | | 21563-25384) | |
| 3 | 348-352 | ATLQA | linker | 1-5 |
| 3 | 353-362 | DPIHSLRVCV | nsp3(NC_045512:+:2720-8554) | 339-348 |
| 3 | 363-367 | ATLQA | linker | 1-5 |
| 3 | 368-379 | ALGKLQDVVNQN | surface_glycoprotein(NC_045512:+: | 944-955 |
| | | | 21563-25384) | |
| 3 | 380-384 | ATLQA | linker | 1-5 |
| 3 | 385-392 | SLIDLQEL | surface_glycoprotein(NC_045512:+: | 1196-1203 |
| | | | 21563-25384) | |
| 3 | 393-397 | ATLQA | linker | 1-5 |
| 3 | 398-406 | FFSNVTWFH | surface_glycoprotein(NC_045512:+: | 58-66 |
| | | | 21563-25384) | |
| 3 | 407-411 | ATLQA | linker | 1-5 |
| 3 | 412-450 | GCDVTDVTQLYLGGMSYYCKSHK | helicase(NC_045512:+:16237-18039) | 54-92 |
| | | PPISFPLCANGQVFGL | | |
| 4 | 1-10 | ACIDCSARHI | nsp3(NC_045512:+:2720-8554) | 1872-1881 |
| 4 | 11-15 | ATLQA | linker | 1-5 |
| 4 | 16-38 | NHDLYCQVHGNAHVASCDAIMTR | 3′-to-5′_exonuclease(NC_045512:+: | 256-278 |
| | | | 18040-19620) | |
| 4 | 39-43 | ATLQA | linker | 1-5 |
| 4 | 44-58 | VNCTEVPVAIHADQL | surface_glycoprotein(NC_045512:+: | 615-629 |
| | | | 21563-25384) | |
| 4 | 59-63 | ATLQA | linker | 1-5 |
| 4 | 64-114 | HFAIGLALYYPSARIVYTACSHA | helicase(NC_045512:+:16237-18039) | 290-340 |
| | | AVDALCEKALKYLPIDKCSRIIP | | |
| | | ARARV | | |
| 4 | 115-119 | ATLQA | linker | 1-5 |
| 4 | 120-134 | FKELLVYAADPAMHA | RNA-dependent_RNA_polymerase(NC_045512:+: | 368-382 |
| | | | 13442-13468+13468-16236) | |
| 4 | 135-139 | ATLQA | linker | 1-5 |
| 4 | 140-147 | RVEAFEYY | nsp3(NC_045512:+:2720-8554) | 810-817 |
| 4 | 148-152 | ATLQA | linker | 1-5 |
| 4 | 153-168 | TGLHPTQAPTHLSVDT | 3′-to-5′_exonuclease(NC_045512:+: | 16-31 |
| | | | 18040-19620) | |
| 4 | 169-173 | ATLQA | linker | 1-5 |
| 4 | 174-186 | LLNVPLHGTILTR | membrane_glycoprotein(NC_045512:+: | 119-131 |
| | | | 26523-27191) | |
| 4 | 187-191 | ATLQA | linker | 1-5 |
| 4 | 192-201 | VTGLFKDCSK | 3′-to-5′_exonuclease(NC_045512:+: | 4-13 |
| | | | 18040-19620) | |
| 4 | 202-206 | ATLQA | linker | 1-5 |
| 4 | 207-214 | TDAVDCAL | surface_glycoprotein(NC_045512:+: | 286-293 |
| | | | 21563-25384) | |
| 4 | 215-219 | ATLQA | linker | 1-5 |
| 4 | 220-230 | DNVLSTFISAA | nsp3(NC_045512:+:2720-8554) | 1809-1819 |
| 4 | 231-235 | ATLQA | linker | 1-5 |
| 4 | 236-245 | FCLEASFNYL | nsp3(NC_045512:+:2720-8554) | 1391-1400 |
| 4 | 246-250 | ATLQA | linker | 1-5 |
| 4 | 251-260 | KCAYWVPRAS | nsp2(NC_045512:+:806-2719) | 239-248 |
| 4 | 261-265 | ATLQA | linker | 1-5 |
| 4 | 266-281 | VREVLSDRELHLSWEV | helicase(NC_045512:+:16237-18039) | 154-169 |
| 4 | 282-286 | ATLQA | linker | 1-5 |
| 4 | 287-306 | KLTCATTRQVVNVVTTKIAL | nsp3(NC_045512:+:2720-8554) | 1923-1942 |
| 4 | 307-311 | ATLQA | linker | 1-5 |
| 4 | 312-322 | YELKHGTFTCA | nsp3(NC_045512:+:2720-8554) | 996-1006 |
| 4 | 323-327 | ATLQA | linker | 1-5 |
| 4 | 328-338 | VVNAANVYLKH | nsp3(NC_045512:+:2720-8554) | 239-249 |
| 4 | 339-343 | ATLQA | linker | 1-5 |
| 4 | 344-362 | LEILDITPCSFGGVSVITP | surface_glycoprotein(NC_045512:+: | 582-600 |
| | | | 21563-25384) | |
| 4 | 363-367 | ATLQA | linker | 1-5 |
| 4 | 368-387 | IRRPFLCCKCCYDHVISTSH | helicase(NC_045512:+:16237-18039) | 20-39 |
| 4 | 388-392 | ATLQA | linker | 1-5 |
| 4 | 393-405 | WNVVRIKIVQMLS | 3′-to-5′_exonuclease(NC_045512:+: | 159-171 |
| | | | 18040-19620) | |
| 4 | 406-410 | ATLQA | linker | 1-5 |
| 4 | 411-423 | NPVLPFNDGVYFA | surface_glycoprotein(NC_045512:+: | 81-93 |
| | | | 21563-25384) | |
| 4 | 424-428 | ATLQA | linker | 1-5 |
| 4 | 429-438 | KSASVYYSQL | nsp3(NC_045512:+:2720-8554) | 1737-1746 |
| 5 | 1-9 | RSVYPVASP | nsp2(NC_045512:+:806-2719) | 121-129 |
| 5 | 10-14 | ATLQA | linker | 1-5 |
| 5 | 15-28 | LKEILVTYNCCDDD | RNA-dependent_RNA_polymerase(NC_045512:+: | 142-155 |
| | | | 13442-13468+13468-16236) | |
| 5 | 29-33 | ATLQA | linker | 1-5 |
| 5 | 34-45 | FNCYFPLQSYGF | surface_glycoprotein(NC_045512:+: | 486-497 |
| | | | 21563-25384) | |
| 5 | 46-50 | ATLQA | linker | 1-5 |
| 5 | 51-58 | AEVQIDRL | surface_glycoprotein(NC_045512:+: | 989-996 |
| | | | 21563-25384) | |
| 5 | 59-63 | ATLQA | linker | 1-5 |
| 5 | 64-74 | EQYVFCTVNAL | helicase(NC_045512:+:16237-18039) | 353-363 |
| 5 | 75-79 | ATLQA | linker | 1-5 |
| 5 | 80-89 | GTNLPLQLGF | 3′-to-5′_exonuclease(NC_045512:+: | 102-111 |
| | | | 18040-19620) | |
| 5 | 90-94 | ATLQA | linker | 1-5 |
| 5 | 95-102 | KLGASQRV | membrane_glycoprotein(NC_045512:+: | 180-187 |
| | | | 26523-27191) | |
| 5 | 103-107 | ATLQA | linker | 1-5 |
| 5 | 108-115 | CLNRVCTN | nsp3(NC_045512:+:2720-8554) | 1342-1349 |
| 5 | 116-120 | ATLQA | linker | 1-5 |
| 5 | 121-128 | YDKLVSSF | nsp3(NC_045512:+:2720-8554) | 365-372 |
| 5 | 129-133 | ATLQA | linker | 1-5 |
| 5 | 134-141 | FKLASHMY | nsp3(NC_045512:+:2720-8554) | 96-103 |
| 5 | 142-146 | ATLQA | linker | 1-5 |
| 5 | 147-178 | IMASLVLARKHTTCCSLSHRFYR | RNA-dependent_RNA_polymerase(NC_045512:+: | 632-663 |
| | | LANECAQVL | 13442-13468+13468-16236) | |
| 5 | 179-183 | ATLQA | linker | 1-5 |
| 5 | 184-192 | VTANVNALL | RNA-dependent_RNA_polymerase(NC_045512:+: | 700-708 |
| | | | 13442-13468+13468-16236) | |
| 5 | 193-197 | ATLQA | linker | 1-5 |
| 5 | 198-208 | LRIAGHHLGRC | membrane_glycoprotein(NC_045512:+: | 149-159 |
| | | | 26523-27191) | |
| 5 | 209-213 | ATLQA | linker | 1-5 |
| 5 | 214-221 | ARDLSLQF | nsp3(NC_045512:+:2720-8554) | 1652-1659 |
| 5 | 222-226 | ATLQA | linker | 1-5 |
| 5 | 227-234 | KAVFISPY | helicase(NC_045512:+:16237-18039) | 508-515 |
| 5 | 235-239 | ATLQA | linker | 1-5 |
| 5 | 240-247 | QIGVVREF | helicase(NC_045512:+:16237-18039) | 492-499 |
| 5 | 248-252 | ATLQA | linker | 1-5 |
| 5 | 253-265 | YAKPFLNKVVSTT | nsp3(NC_045512:+:2720-8554) | 1323-1335 |
| 5 | 266-270 | ATLQA | linker | 1-5 |
| 5 | 271-278 | DSYFVVKR | RNA-dependent_RNA_polymerase(NC_045512:+: | 67-74 |
| | | | 13442-13468+13468-16236) | |
| 5 | 279-283 | ATLQA | linker | 1-5 |
| 5 | 284-296 | NFRVQPTESIVRF | surface_glycoprotein(NC_045512:+: | 317-329 |
| | | | 21563-25384) | |
| 5 | 297-301 | ATLQA | linker | 1-5 |
| 5 | 302-311 | QEHYVRITGL | helicase(NC_045512:+:16237-18039) | 243-252 |
| 5 | 312-316 | ATLQA | linker | 1-5 |
| 5 | 317-326 | VQQESPFVMM | nsp3(NC_045512:+:2720-8554) | 980-989 |
| 5 | 327-331 | ATLQA | linker | 1-5 |
| 5 | 332-341 | GVITHDVSSA | helicase(NC_045512:+:16237-18039) | 478-487 |
| 5 | 342-346 | ATLQA | linker | 1-5 |
| 5 | 347-356 | VVADAVIKTL | nsp3(NC_045512:+:2720-8554) | 56-65 |
| 5 | 357-361 | ATLQA | linker | 1-5 |
| 5 | 362-373 | TRAKVGILCIMS | helicase(NC_045512:+:16237-18039) | 566-577 |
| 5 | 374-378 | ATLQA | linker | 1-5 |
| 5 | 379-398 | MTSCCSCLKGCCSCGSCCKF | surface_glycoprotein(NC_045512:+: | 1237-1256 |
| | | | 21563-25384) | |
| 5 | 399-403 | ATLQA | linker | 1-5 |
| 5 | 404-413 | GNCDVVIGIV | surface_glycoprotein(NC_045512:+: | 1124-1133 |
| | | | 21563-25384) | |
| 5 | 414-418 | ATLQA | linker | 1-5 |
| 5 | 419-430 | YPSLETIQITIS | nsp3(NC_045512:+:2720-8554) | 1483-1494 |
| 5 | 431-435 | ATLQA | linker | 1-5 |
| 5 | 436-455 | RAKHYVYIGDPAQLPAPRTL | helicase(NC_045512:+:16237-18039) | 392-411 |
| 6 | 1-18 | LNDLCFTNVYADSFVIRG | surface_glycoprotein(NC_045512:+: | 387-404 |
| | | | 21563-25384) | |
| 6 | 19-23 | ATLQA | linker | 1-5 |
| 6 | 24-37 | RNLQHRLYECLYRN | RNA-dependent_RNA_polymerase(NC_045512:+: | 721-734 |
| | | | 13442-13468+13468-16236) | |
| 6 | 38-42 | ATLQA | linker | 1-5 |
| 6 | 43-51 | AAAYYVGYL | surface_glycoprotein(NC_045512:+: | 262-270 |
| | | | 21563-25384) | |
| 6 | 52-56 | ATLQA | linker | 1-5 |
| 6 | 57-78 | GYQPYRVVVLSFELLHAPATVC | surface_glycoprotein(NC_045512:+: | 504-525 |
| | | | 21563-25384) | |
| 6 | 79-83 | ATLQA | linker | 1-5 |
| 6 | 84-92 | SRELKVTFF | nsp3(NC_045512:+:2720-8554) | 1134-1142 |
| 6 | 93-97 | ATLQA | linker | 1-5 |
| 6 | 98-105 | LPINVIVF | nsp3(NC_045512:+:2720-8554) | 1718-1725 |
| 6 | 106-110 | ATLQA | linker | 1-5 |
| 6 | 111-137 | FSASTSAFVETVKGLDYKAFKQI | nsp2(NC_045512:+:806-2719) | 300-326 |
| | | VESC | | |
| 6 | 138-142 | ATLQA | linker | 1-5 |
| 6 | 143-150 | NNLVVMAY | nsp2(NC_045512:+:806-2719) | 413-420 |
| 6 | 151-155 | ATLQA | linker | 1-5 |
| 6 | 156-163 | GVYCCREH | nsp2(NC_045512:+:806-2719) | 47-54 |
| 6 | 164-168 | ATLQA | linker | 1-5 |
| 6 | 169-183 | TYACWHHSIGFDYVY | 3′-to-5′_exonuclease(NC_045512:+: | 223-237 |
| | | | 18040-19620) | |
| 6 | 184-188 | ATLQA | linker | 1-5 |
| 6 | 189-208 | FCKLHNWNCVNCDTFCAGST | nsp3(NC_045512:+:2720-8554) | 1626-1645 |
| 6 | 209-213 | ATLQA | linker | 1-5 |
| 6 | 214-223 | DVVAIDYKHY | nsp3(NC_045512:+:2720-8554) | 1148-1157 |
| 6 | 224-228 | ATLQA | linker | 1-5 |
| 6 | 229-245 | PNFVFPLNSIIKTIQPR | nsp2(NC_045512:+:806-2719) | 91-107 |
| 6 | 246-250 | ATLQA | linker | 1-5 |
| 6 | 251-261 | IEELFYSYATH | 3′-to-5′_exonuclease(NC_045512:+: | 363-373 |
| | | | 18040-19620) | |
| 6 | 262-266 | ATLQA | linker | 1-5 |
| 6 | 267-276 | TQNVLYENQK | surface_glycoprotein(NC_045512:+: | 912-921 |
| | | | 21563-25384) | |
| 6 | 277-281 | ATLQA | linker | 1-5 |
| 6 | 282-297 | ANSIVCRFDTRVLSNL | 3′-to-5′_exonuclease(NC_045512:+: | 394-409 |
| | | | 18040-19620) | |
| 6 | 298-302 | ATLQA | linker | 1-5 |
| 6 | 303-312 | RHSLSHFVNL | nsp3(NC_045512:+:2720-8554) | 1697-1706 |
| 6 | 313-317 | ATLQA | linker | 1-5 |
| 6 | 318-342 | SDIDITFLKKDAPYIVGDVVQEG | nsp3(NC_045512:+:2720-8554) | 454-478 |
| | | VL | | |
| 6 | 343-347 | ATLQA | linker | 1-5 |
| 6 | 348-358 | KESVQTFFKLV | nsp2(NC_045512:+:806-2719) | 492-502 |
| 6 | 359-363 | ATLQA | linker | 1-5 |
| 6 | 364-383 | LQKAAITILDGISQYSLRLI | nsp2(NC_045512:+:806-2719) | 382-401 |
| 6 | 384-388 | ATLQA | linker | 1-5 |
| 6 | 389-405 | LECNVKTTEVVGDIILK | nsp3(NC_045512:+:2720-8554) | 1244-1260 |
| 6 | 406-410 | ATLQA | linker | 1-5 |
| 6 | 411-423 | ATNVVIKVCEFQF | surface_glycoprotein(NC_045512:+: | 123-135 |
| | | | 21563-25384) | |
| 6 | 424-428 | ATLQA | linker | 1-5 |
| 6 | 429-444 | TVLKKCKSAFYILPSI | nsp3(NC_045512:+:2720-8554) | 526-541 |

[0091] In certain embodiments, the vaccine comprises or expresses at least one of the concatemers of epitopes from SARS-COV-2 with intervening linker sequences (and as set forth in FIG. 16). In certain embodiments, the vaccine comprises or expresses at least two of the concatemers set forth below. In certain embodiments, the vaccine comprises or expresses three of the concatemers set forth below. In certain embodiments, the vaccine comprises or expresses four of the concatemers set forth below. In certain embodiments, the vaccine comprises or expresses five of the concatemers set forth below. In certain embodiments, the vaccine comprises or expresses all the concatemers set forth below.

TABLE 6

| | pos_in_ | | | pos_ |
|---|---|---|---|---|
| concatemers | concatemer | epitope | gene | in_gene |
| 1 | 1-12 | NIGCNHTGVVGE | nsp2(NC_045512:+:806-2719) | 250-261 |
| 1 | 13-17 | ATLQA | linker | 1-5 |
| 1 | 18-32 | ISNCVADYSVLYNSA | surface_glycoprotein@Aruba(NC_045512@Aruba:+: | 354-368 |
| | | | 21563-25384) | |
| 1 | 33-37 | ATLQA | linker | 1-5 |
| 1 | 38-45 | MADLVYAL | RNA-dependent_RNA_polymerase(NC_045512:+: | 124-131 |
| | | | 13442-13468+13468-16236) | |
| 1 | 46-50 | ATLQA | linker | 1-5 |
| 1 | 51-58 | REGVFVSN | surface_glycoprotein@Aruba(NC_045512@Aruba:+: | 1087-1094 |
| | | | 21563-25384) | |
| 1 | 59-63 | ATLQA | linker | 1-5 |
| 1 | 64-114 | HFAIGLALYYPSARIV | helicase(NC_045512:+:16237-18039) | 290-340 |
| | | YTACSHAAVDALCEKA | | |
| | | LKYLPIDKCSRIIPAR | | |
| | | ARV | | |
| 1 | 115-119 | ATLQA | linker | 1-5 |
| 1 | 120-136 | YADVFHLYLQYIRKLH | RNA-dependent_RNA_polymerase(NC_045512:+: | 877-893 |
| | | D | 13442-13468+13468-16236) | |
| 1 | 137-141 | ATLQA | linker | 1-5 |
| 1 | 142-154 | IVKFISTCACEIV | nsp2(NC_045512:+:806-2719) | 468-480 |
| 1 | 155-159 | ATLQA | linker | 1-5 |
| 1 | 160-167 | RVEAFEYY | nsp3(NC_045512:+:2720-8554) | 810-817 |
| 1 | 168-172 | ATLQA | linker | 1-5 |
| 1 | 173-180 | GVYCCREH | nsp2(NC_045512:+:806-2719) | 47-54 |
| 1 | 181-185 | ATLQA | linker | 1-5 |
| 1 | 186-205 | RAKHYVYIGDPAQLPA | helicase(NC_045512:+:16237-18039) | 392-411 |
| | | PRTL | | |
| 1 | 206-210 | ATLQA | linker | 1-5 |
| 1 | 211-218 | EIYQAGSK | surface_glycoprotein@Mexico(NC_045512@Mexico:+: | 471-478 |
| | | | 21563-25384) | |
| 1 | 219-223 | ATLQA | linker | 1-5 |
| 1 | 224-235 | YPSLETIQITIS | nsp3(NC_045512:+:2720-8554) | 1483-1494 |
| 1 | 236-240 | ATLQA | linker | 1-5 |
| 1 | 241-250 | KSASVYYSQL | nsp3(NC_045512:+:2720-8554) | 1737-1746 |
| 1 | 251-255 | ATLQA | linker | 1-5 |
| 1 | 256-270 | VNCTEVPVAIHADQL | surface_glycoprotein(NC_045512:+:21563-25384) | 615-629 |
| 1 | 271-275 | ATLQA | linker | 1-5 |
| 1 | 276-291 | TGLHPTQAPTHLSVDT | 3′-to-5′_exonuclease(NC_045512:+:18040-19620) | 16-31 |
| 1 | 292-296 | ATLQA | linker | 1-5 |
| 1 | 297-309 | ISSVLNDILSRLD | surface_glycoprotein@Bangladesh | 972-984 |
| | | | (NC_045512@Bangladesh:+:21563-25384) | |
| 1 | 310-314 | ATLQA | linker | 1-5 |
| 1 | 315-331 | LECNVKTTEVVGDIIL | nsp3(NC_045512:+:2720-8554) | 1244-1260 |
| | | K | | |
| 1 | 332-336 | ATLQA | linker | 1-5 |
| 1 | 337-351 | FKELLVYAADPAMHA | RNA-dependent_RNA_polymerase(NC_045512:+: | 368-382 |
| | | | 13442-13468+13468-16236) | |
| 1 | 352-356 | ATLQA | linker | 1-5 |
| 1 | 357-367 | DNVLSTFISAA | nsp3(NC_045512:+:2720-8554) | 1809-1819 |
| 1 | 368-372 | ATLQA | linker | 1-5 |
| 1 | 373-381 | VTANVNALL | RNA-dependent_RNA_polymerase(NC_045512:+: | 700-708 |
| | | | 13442-13468+13468-16236) | |
| 1 | 382-386 | ATLQA | linker | 1-5 |
| 1 | 387-401 | INAACRKVQHMVVKA | 3′-to-5′_exonuclease(NC_045512:+:18040-19620) | 305-319 |
| 1 | 402-406 | ATLQA | linker | 1-5 |
| 1 | 407-418 | ALGKLQDVVNQN | surface_glycoprotein(NC_045512:+:21563-25384) | 944-955 |
| 1 | 419-423 | ATLQA | linker | 1-5 |
| 1 | 424-435 | SSPDAVTAYNGY | nsp3(NC_045512:+:2720-8554) | 660-671 |
| 1 | 436-440 | ATLQA | linker | 1-5 |
| 1 | 441-460 | GYLPQNAVVKIYCPAC | nsp2(NC_045512:+:806-2719) | 178-197 |
| | | HNSE | | |
| 1 | 461-465 | ATLQA | linker | 1-5 |
| 1 | 466-475 | RHSLSHFVNL | nsp3(NC_045512:+:2720-8554) | 1697-1706 |
| 1 | 476-480 | ATLQA | linker | 1-5 |
| 1 | 481-492 | FSNVTWFHAIVS | surface_glycoprotein@Ghana(NC_045512@Ghana:+: | 59-70 |
| | | | 21563-25384) | |
| 1 | 493-497 | ATLQA | linker | 1-5 |
| 1 | 498-513 | LQSLQTYVTQQLIRAA | surface_glycoprotein(NC_045512:+:21563-25384) | 1001-1016 |
| 1 | 514-518 | ATLQA | linker | 1-5 |
| 1 | 519-541 | SHGKQVVSDIDYVPLK | 3′-to-5′_exonuclease(NC_045512:+:18040-19620) | 454-476 |
| | | SATCITR | | |
| 1 | 542-546 | ATLQA | linker | 1-5 |
| 1 | 547-560 | LVLLPLVSSQCVNF | surface_glycoprotein@Brazil(NC_045512@Brazil:+: | 5-18 |
| | | | 21563-25384) | |
| 1 | 561-565 | ATLQA | linker | 1-5 |
| 1 | 566-575 | TQNVLYENQK | surface_glycoprotein(NC_045512:+:21563-25384) | 912-921 |
| 1 | 576-580 | ATLQA | linker | 1-5 |
| 1 | 581-591 | VLYQGVNCTEV | surface_glycoprotein@Aruba(NC_045512@Aruba:+: | 606-616 |
| | | | 21563-25384) | |
| 1 | 592-596 | ATLQA | linker | 1-5 |
| 1 | 597-628 | IMASLVLARKHTTCCS | RNA-dependent_RNA_polymerase(NC_045512:+: | 632-663 |
| | | LSHRFYRLANECAQVL | 13442-13468+13468-16236) | |
| 2 | 1-13 | AFASEAARVVRSI | nsp2(NC_045512:+:806-2719) | 355-367 |
| 2 | 14-18 | ATLQA | linker | 1-5 |
| 2 | 19-32 | SDRVVFVLWAHGFE | 3′-to-5′_exonuclease(NC_045512:+:18040-19620) | 178-191 |
| 2 | 33-37 | ATLQA | linker | 1-5 |
| 2 | 38-47 | SVLNDILARL | surface_glycoprotein@Aruba(NC_045512@Aruba:+: | 971-980 |
| | | | 21563-25384) | |
| 2 | 48-52 | ATLQA | linker | 1-5 |
| 2 | 53-66 | TSGVGYQPYRVVVL | surface_glycoprotein@Aruba(NC_045512@Aruba:+: | 496-509 |
| | | | 21563-25384) | |
| 2 | 67-71 | ATLQA | linker | 1-5 |
| 2 | 72-91 | PINLVRGLPQGFSALE | surface_glycoprotein@Austria | 205-224 |
| | | PLVD | (NC_045512@Austria:+:21563-25384) | |
| 2 | 92-96 | ATLQA | linker | 1-5 |
| 2 | 97-109 | RSVASQSIIAYTM | surface_glycoprotein@Aruba(NC_045512@Aruba:+: | 681-693 |
| | | | 21563-25384) | |
| 2 | 110-114 | ATLQA | linker | 1-5 |
| 2 | 115-125 | KGVQIPCTCGK | nsp3(NC_045512:+:2720-8554) | 963-973 |
| 2 | 126-130 | ATLQA | linker | 1-5 |
| 2 | 131-140 | KACVEEVTTT | nsp3(NC_045512:+:2720-8554) | 415-424 |
| 2 | 141-145 | ATLQA | linker | 1-5 |
| 2 | 146-155 | KCAYWVPRAS | nsp2(NC_045512:+:806-2719) | 239-248 |
| 2 | 156-160 | ATLQA | linker | 1-5 |
| 2 | 161-172 | VTMPLGYVTHGL | nsp3(NC_045512:+:2720-8554) | 628-639 |
| 2 | 173-177 | ATLQA | linker | 1-5 |
| 2 | 178-187 | NEFYAYLRKH | RNA-dependent_RNA_polymerase(NC_045512:+: | 743-752 |
| | | | 13442-13468+13468-16236) | |
| 2 | 188-192 | ATLQA | linker | 1-5 |
| 2 | 193-207 | EFQFCNDPFLGVYYH | surface_glycoprotein@Chile(NC_045512@Chile:+: | 132-146 |
| | | | 21563-25384) | |
| 2 | 208-212 | ATLQA | linker | 1-5 |
| 2 | 213-235 | TIATYCTGSIPCSVCL | nsp3(NC_045512:+:2720-8554) | 1459-1481 |
| | | SGLDSLD | | |
| 2 | 236-240 | ATLQA | linker | 1-5 |
| 2 | 241-257 | CSNLLLQYGSFCTQLN | surface_glycoprotein(NC_045512:+:21563-25384) | 749-765 |
| | | R | | |
| 2 | 258-262 | ATLQA | linker | 1-5 |
| 2 | 263-272 | NYQCGHYKHI | nsp3(NC_045512:+:2720-8554) | 1012-1021 |
| 2 | 273-277 | ATLQA | linker | 1-5 |
| 2 | 278-293 | ANSIVCRFDTRVLSNL | 3′-to-5′_exonuclease(NC_045512:+:18040-19620) | 394-409 |
| 2 | 294-298 | ATLQA | linker | 1-5 |
| 2 | 299-307 | SRELKVTFF | nsp3(NC_045512:+:2720-8554) | 1134-1142 |
| 2 | 308-312 | ATLQA | linker | 1-5 |
| 2 | 313-323 | YELKHGTFTCA | nsp3(NC_045512:+:2720-8554) | 996-1006 |
| 2 | 324-328 | ATLQA | linker | 1-5 |
| 2 | 329-337 | VFSQCVNLT | surface_glycoprotein@Egypt(NC_045512@Egypt:+: | 11-19 |
| | | | 21563-25384) | |
| 2 | 338-342 | ATLQA | linker | 1-5 |
| 2 | 343-364 | GYQPYRVVVLSFELLH | surface_glycoprotein(NC_045512:+:21563-25384) | 504-525 |
| | | APATVC | | |
| 2 | 365-369 | ATLQA | linker | 1-5 |
| 2 | 370-389 | FPQSAPHGVVFLHVTY | surface_glycoprotein@Aruba(NC_045512@Aruba:+: | 1048-1067 |
| | | VPAQ | 21563-25384) | |
| 2 | 390-394 | ATLQA | linker | 1-5 |
| 2 | 395-406 | FRSSVLHSTRDL | surface_glycoprotein@Nigeria | 43-54 |
| | | | (NC_045512@Nigeria:+:21563-25384) | |
| 2 | 407-411 | ATLQA | linker | 1-5 |
| 2 | 412-425 | EGVVDYGARFYFYT | nsp3(NC_045512:+:2720-8554) | 595-608 |
| 2 | 426-430 | ATLQA | linker | 1-5 |
| 2 | 431-440 | GNCDVVIGIV | surface_glycoprotein(NC_045512:+:21563-25384) | 1124-1133 |
| 2 | 441-445 | ATLQA | linker | 1-5 |
| 2 | 446-453 | AALQIPFA | surface_glycoprotein(NC_045512:+:21563-25384) | 892-899 |
| 2 | 454-458 | ATLQA | linker | 1-5 |
| 2 | 459-474 | FLVLLPLVSIQCVNLT | surface_glycoprotein@SmallNorthAmerica | 4-19 |
| | | | (NC_045512@SmallNorthAmerica:+:21563-25384) | |
| 2 | 475-479 | ATLQA | linker | 1-5 |
| 2 | 480-487 | CLNRVCTN | nsp3(NC_045512:+:2720-8554) | 1342-1349 |
| 2 | 488-492 | ATLQA | linker | 1-5 |
| 2 | 493-507 | EFQFCNYPFLGVYHK | surface_glycoprotein@Norway(NC_045512@Norway:+: | 129-143 |
| | | | 21563-25384) | |
| 2 | 508-512 | ATLQA | linker | 1-5 |
| 2 | 513-527 | TYGVGYQPYRVVVLS | surface_glycoprotein@Australia | 496-510 |
| | | | (NC_045512@Australia:+:21563-25384) | |
| 2 | 528-532 | ATLQA | linker | 1-5 |
| 2 | 533-546 | ETKCTLKSFTVEKG | surface_glycoprotein@Aruba(NC_045512@Aruba:+: | 294-307 |
| | | | 21563-25384) | |
| 2 | 547-551 | ATLQA | linker | 1-5 |
| 2 | 552-564 | AIKCVPQADVEWK | 3′-to-5′_exonuclease(NC_045512:+:18040-19620) | 337-349 |
| 2 | 565-569 | ATLQA | linker | 1-5 |
| 2 | 570-589 | IRRPFLCCKCCYDHVI | helicase(NC_045512:+:16237-18039) | 20-39 |
| | | STSH | | |
| 2 | 590-594 | ATLQA | linker | 1-5 |
| 2 | 595-614 | PINLVRGLPQGFSVLE | surface_glycoprotein@SmallAfrica | 209-228 |
| | | PLVD | (NC_045512@SmallAfrica:+:21563-25384) | |
| 2 | 615-619 | ATLQA | linker | 1-5 |
| 2 | 620-638 | KLNVGDYFVLTSHTVM | helicase(NC_045512:+:16237-18039) | 218-236 |
| | | PLS | | |
| 3 | 1-10 | ETFVTHSKGL | nsp2(NC_045512:+:806-2719) | 527-536 |
| 3 | 11-15 | ATLQA | linker | 1-5 |
| 3 | 16-38 | NHDLYCQVHGNAHVAS | 3′-to-5′_exonuclease(NC_045512:+:18040-19620) | 256-278 |
| | | CDAIMTR | | |
| 3 | 39-43 | ATLQA | linker | 1-5 |
| 3 | 44-52 | TEIYQAGST | surface_glycoprotein@Aruba(NC_045512@Aruba:+: | 466-474 |
| | | | 21563-25384) | |
| 3 | 53-57 | ATLQA | linker | 1-5 |
| 3 | 58-66 | AGFSLWVYK | 3′-to-5′_exonuclease(NC_045512:+:18040-19620) | 504-512 |
| 3 | 67-71 | ATLQA | linker | 1-5 |
| 3 | 72-84 | FQTLLALHRSYLT | surface_glycoprotein@Aruba(NC_045512@Aruba:+: | 234-246 |
| | | | 21563-25384) | |
| 3 | 85-89 | ATLQA | linker | 1-5 |
| 3 | 90-103 | TKDVVECLKLSHQS | nsp3(NC_045512:+:2720-8554) | 1830-1843 |
| 3 | 104-108 | ATLQA | linker | 1-5 |
| | 109-116 | YDKLVSSF | nsp3(NC_045512:+:2720-8554) | 365-372 |
| 3 | 117-121 | ATLQA | linker | 1-5 |
| 3 | 122-129 | LPINVIVF | nsp3(NC_045512:+:2720-8554) | 1718-1725 |
| | 130-134 | ATLQA | linker | 1-5 |
| 3 | 135-145 | SELVIGAVILR | membrane_glycoprotein(NC_045512:+:26523-27191) | 136-146 |
| 3 | 146-150 | ATLQA | linker | 1-5 |
| | 151-163 | KASCTLSEQLDFI | nsp2(NC_045512:+:806-2719) | 30-42 |
| 3 | 164-168 | ATLQA | linker | 1-5 |
| 3 | 169-183 | FSVAALTNNVAFQTV | RNA-dependent_RNA_polymerase(NC_045512:+: | 396-410 |
| | | | 13442-13468+13468-16236) | |
| 3 | 184-188 | ATLQA | linker | 1-5 |
| 3 | 189-197 | EPLLKGVKL | surface_glycoprotein@Croatia | 1258-1266 |
| | | | (NC_045512@Croatia:+:21563-25384) | |
| 3 | 198-202 | ATLQA | linker | 1-5 |
| 3 | 203-241 | GCDVTDVTQLYLGGMS | helicase(NC_045512:+:16237-18039) | 54-92 |
| | | YYCKSHKPPISFPLCA | | |
| | | NGQVFGL | | |
| 3 | 242-246 | ATLQA | linker | 1-5 |
| 3 | 247-256 | FCLEASFNYL | nsp3(NC_045512:+:2720-8554) | 1391-1400 |
| 3 | 257-261 | ATLQA | linker | 1-5 |
| 3 | 262-272 | LRIAGHHLGRC | membrane_glycoprotein(NC_045512:+:26523-27191) | 149-159 |
| 3 | 273-277 | ATLQA | linker | 1-5 |
| 3 | 278-289 | TRAKVGILCIMS | helicase(NC_045512:+:16237-18039) | 566-577 |
| 3 | 290-294 | ATLQA | linker | 1-5 |
| 3 | 295-302 | IETISLAG | nsp3(NC_045512:+:2720-8554) | 684-691 |
| 3 | 303-307 | ATLQA | linker | 1-5 |
| 3 | 308-319 | FNCYFPLQSYGF | surface_glycoprotein(NC_045512:+:21563-25384) | 486-497 |
| 3 | 320-324 | ATLQA | linker | 1-5 |
| 3 | 325-339 | ARSVARQSIIAYTMS | surface_glycoprotein@Mozambique | 680-694 |
| | | | (NC_045512@Mozambique:+:21563-25384) | |
| 3 | 340-344 | ATLQA | linker | 1-5 |
| 3 | 345-354 | SVELKHFFFA | RNA-dependent_RNA_polymerase(NC_045512:+: | 434-443 |
| | | | 13442-13468+13468-16236) | |
| 3 | 355-359 | ATLQA | linker | 1-5 |
| 3 | 360-372 | NFRVQPTESIVRF | surface_glycoprotein(NC_045512:+:21563-25384) | 317-329 |
| 3 | 373-377 | ATLQA | linker | 1-5 |
| 3 | 378-389 | VRTNVYLAVFDK | nsp3(NC_045512:+:2720-8554) | 351-362 |
| 3 | 390-394 | ATLQA | linker | 1-5 |
| 3 | 395-407 | ATNVVIKVCEFQF | surface_glycoprotein(NC_045512:+:21563-25384) | 123-135 |
| 3 | 408-412 | ATLQA | linker | 1-5 |
| 3 | 413-420 | PVLKGVKL | surface_glycoprotein@Aruba(NC_045512@Aruba:+: | 1259-1266 |
| | | | 21563-25384) | |
| 3 | 421-425 | ATLQA | linker | 1-5 |
| 3 | 426-444 | LEILDITPCSFGGVSV | surface_glycoprotein(NC_045512:+:21563-25384) | 582-600 |
| | | ITP | | |
| 3 | 445-449 | ATLQA | linker | 1-5 |
| 3 | 450-465 | TVLKKCKSAFYILPSI | nsp3(NC_045512:+:2720-8554) | 526-541 |
| 3 | 466-470 | ATLQA | linker | 1-5 |
| 3 | 471-482 | FQTLLHRSYLTP | surface_glycoprotein@SmallAsia | 230-241 |
| | | | (NC_045512@SmallAsia:+:21563-25384) | |
| 3 | 483-487 | ATLQA | linker | 1-5 |
| 3 | 488-501 | FFSNVTWFHAIHVS | surface_glycoprotein@Bangladesh | 58-71 |
| | | | (NC_045512@Bangladesh:+:21563-25384) | |
| 3 | 502-506 | ATLQA | linker | 1-5 |
| 3 | 507-517 | HFPRKGVFVSN | surface_glycoprotein@SmallAsia | 1078-1088 |
| | | | (NC_045512@SmallAsia:+:21563-25384) | |
| 3 | 518-522 | ATLQA | linker | 1-5 |
| 3 | 523-534 | HEFCSQHTMLVK | RNA-dependent_RNA_polymerase(NC_045512:+: | 810-821 |
| | | | 13442-13468+13468-16236) | |
| 3 | 535-539 | ATLQA | linker | 1-5 |
| 3 | 540-547 | AEVQIDRL | surface_glycoprotein(NC_045512:+:21563-25384) | 989-996 |
| 3 | 548-552 | ATLQA | linker | 1-5 |
| 3 | 553-568 | VREVLSDRELHLSWEV | helicase(NC_045512:+:16237-18039) | 154-169 |
| 3 | 569-573 | ATLQA | linker | 1-5 |
| 3 | 574-589 | FSNVTWFHAIHVSGTN | surface_glycoprotein@Peru(NC_045512@Peru:+: | 59-74 |
| | | | 21563-25384) | |
| 3 | 590-594 | ATLQA | linker | 1-5 |
| 3 | 595-602 | ARDLSLQF | nsp3(NC_045512:+:2720-8554) | 1652-1659 |
| 3 | 603-607 | ATLQA | linker | 1-5 |
| 3 | 608-615 | STFKCYGV | surface_glycoprotein@Aruba(NC_045512@Aruba:+: | 371-378 |
| | | | 21563-25384) | |
| 3 | 616-620 | ATLQA | linker | 1-5 |
| 3 | 621-630 | SSVLHSTQDF | surface_glycoprotein@Norway(NC_045512@Norway:+: | 45-54 |
| | | | 21563-25384) | |
| 4 | 1-10 | ACIDCSARHI | nsp3(NC_045512:+:2720-8554) | 1872-1881 |
| 4 | 11-15 | ATLQA | linker | 1-5 |
| 4 | 16-32 | AQSFLNRVCGVSAARL | RNA-dependent_RNA_polymerase(NC_045512:+: | 4-20 |
| | | T | 13442-13468+13468-16236) | |
| 4 | 33-37 | ATLQA | linker | 1-5 |
| 4 | 38-50 | GVNLVAVPTGYVD | 3′-to-5′_exonuclease(NC_045512:+:18040-19620) | 114-126 |
| 4 | 51-55 | ATLQA | linker | 1-5 |
| 4 | 56-67 | FRSSVLHSTQDL | surface_glycoprotein@Aruba(NC_045512@Aruba:+: | 43-54 |
| | | | 21563-25384) | |
| 4 | 68-72 | ATLQA | linker | 1-5 |
| 4 | 73-86 | ANPVLPFNDGVYFA | surface_glycoprotein@Austria | 77-90 |
| | | | (NC_045512@Austria:+:21563-25384) | |
| 4 | 87-91 | ATLQA | linker | 1-5 |
| 4 | 92-111 | YVYLPYPDPSRILGAG | RNA-dependent_RNA_polymerase(NC_045512:+: | 826-845 |
| | | CFVD | 13442-13468+13468-16236) | |
| 4 | 112-116 | ATLQA | linker | 1-5 |
| 4 | 117-136 | LQKAAITILDGISQYS | nsp2(NC_045512:+:806-2719) | 382-401 |
| | | LRLI | | |
| 4 | 137-141 | ATLQA | linker | 1-5 |
| 4 | 142-153 | VPVVDSYYSLLM | RNA-dependent_RNA_polymerase(NC_045512:+: | 231-242 |
| | | | 13442-13468+13468-16236) | |
| 4 | 154-158 | ATLQA | linker | 1-5 |
| 4 | 159-176 | LFVVEVVDKYFDCYDG | RNA-dependent_RNA_polymerase(NC_045512:+: | 470-487 |
| | | GC | 13442-13468+13468-16236) | |
| 4 | 177-181 | ATLQA | linker | 1-5 |
| 4 | 182-192 | AVHECFVKRVD | 3′-to-5′_exonuclease(NC_045512:+:18040-19620) | 281-291 |
| 4 | 193-197 | ATLQA | linker | 1-5 |
| 4 | 198-207 | GVITHDVSSA | helicase(NC_045512:+:16237-18039) | 478-487 |
| 4 | 208-212 | ATLQA | linker | 1-5 |
| 4 | 213-224 | IEVQGYKSVNIT | nsp3(NC_045512:+:2720-8554) | 13-24 |
| 4 | 225-229 | ATLQA | linker | 1-5 |
| 4 | 230-243 | IKVCEFQFCNDPYY | surface_glycoprotein@CostaRica | 128-141 |
| | | | (NC_045512@CostaRica:+:21563-25384) | |
| 4 | 244-248 | ATLQA | linker | 1-5 |
| 4 | 249-258 | VQQESPFVMM | nsp3(NC_045512:+:2720-8554) | 980-989 |
| 4 | 259-263 | ATLQA | linker | 1-5 |
| 4 | 264-278 | TISVTTEILPVSMAK | surface_glycoprotein@Mexico(NC_045512@Mexico:+: | 719-733 |
| | | | 21563-25384) | |
| 4 | 279-283 | ATLQA | linker | 1-5 |
| 4 | 284-295 | AKLLHKPIVWHV | nsp3(NC_045512:+:2720-8554) | 1165-1176 |
| 4 | 296-300 | ATLQA | linker | 1-5 |
| 4 | 301-317 | PNFVFPLNSIIKTIQP | nsp2(NC_045512:+:806-2719) | 91-107 |
| | | R | | |
| 4 | 318-322 | ATLQA | linker | 1-5 |
| 4 | 323-331 | MPVCVETKA | nsp3(NC_045512:+:2720-8554) | 571-579 |
| 4 | 332-336 | ATLQA | linker | 1-5 |
| 4 | 337-344 | PEHSLAEY | nsp2(NC_045512:+:806-2719) | 200-207 |
| 4 | 345-349 | ATLQA | linker | 1-5 |
| 4 | 350-369 | KLTCATTRQVVNVVTT | nsp3(NC_045512:+:2720-8554) | 1923-1942 |
| | | KIAL | | |
| 4 | 370-374 | ATLQA | linker | 1-5 |
| 4 | 375-384 | ARDLICAQKF | surface_glycoprotein(NC_045512:+:21563-25384) | 846-855 |
| 4 | 385-389 | ATLQA | linker | 1-5 |
| 4 | 390-408 | AIPINFTISVTTEILP | surface_glycoprotein@Aruba(NC_045512@Aruba:+: | 709-727 |
| | | VSM | 21563-25384) | |
| 4 | 409-413 | ATLQA | linker | 1-5 |
| 4 | 414-422 | YDLSVVNAR | helicase(NC_045512:+:16237-18039) | 382-390 |
| 4 | 423-427 | ATLQA | linker | 1-5 |
| 4 | 428-441 | GFNCYSPLQSYGFQ | surface_glycoprotein@Peru(NC_045512@Peru:+: | 485-498 |
| | | | 21563-25384) | |
| 4 | 442-446 | ATLQA | linker | 1-5 |
| 4 | 447-456 | AGAALQIPFA | surface_glycoprotein@Nigeria | 886-895 |
| | | | (NC_045512@Nigeria:+:21563-25384) | |
| 4 | 457-461 | ATLQA | linker | 1-5 |
| 4 | 462-480 | QVAVLYQDVNCTEVPV | surface_glycoprotein@China(NC_045512@China:+: | 607-625 |
| | | AIH | 21563-25384) | |
| 4 | 481-485 | ATLQA | linker | 1-5 |
| 4 | 486-495 | QEHYVRITGL | helicase(NC_045512:+:16237-18039) | 243-252 |
| 4 | 496-500 | ATLQA | linker | 1-5 |
| 4 | 501-514 | FGTVYEKLKPVLDW | nsp2(NC_045512:+:806-2719) | 437-450 |
| 4 | 515-519 | ATLQA | linker | 1-5 |
| 4 | 520-529 | VVADAVIKTL | nsp3(NC_045512:+:2720-8554) | 56-65 |
| 4 | 530-534 | ATLQA | linker | 1-5 |
| 4 | 535-542 | ISNCVADY | surface_glycoprotein(NC_045512:+:21563-25384) | 358-365 |
| 4 | 543-547 | ATLQA | linker | 1-5 |
| 4 | 548-556 | EVFAQVKQI | surface_glycoprotein(NC_045512:+:21563-25384) | 780-788 |
| 4 | 557-561 | ATLQA | linker | 1-5 |
| 4 | 562-574 | YAKPFLNKVVSTT | nsp3(NC_045512:+:2720-8554) | 1323-1335 |
| 4 | 575-579 | ATLQA | linker | 1-5 |
| 4 | 580-587 | TDAVDCAL | surface_glycoprotein(NC_045512:+:21563-25384) | 286-293 |
| 4 | 588-592 | ATLQA | linker | 1-5 |
| 4 | 593-604 | ISVTTEILPVSM | surface_glycoprotein(NC_045512:+:21563-25384) | 720-731 |
| 4 | 605-609 | ATLQA | linker | 1-5 |
| 4 | 610-617 | FTGCVIAW | surface_glycoprotein(NC_045512:+:21563-25384) | 429-436 |
| 4 | 618-622 | ATLQA | linker | 1-5 |
| 4 | 623-640 | IKVCEFQFCNDPFLGV | surface_glycoprotein@Aruba(NC_045512@Aruba:+: | 125-142 |
| | | YH | 21563-25384) | |
| 5 | 1-9 | RSVYPVASP | nsp2(NC_045512:+:806-2719) | 121-129 |
| 5 | 10-14 | ATLQA | linker | 1-5 |
| 5 | 15-28 | LKEILVTYNCCDDD | RNA-dependent_RNA_polymerase(NC_045512:+: | 142-155 |
| | | | 13442-13468+13468-16236) | |
| 5 | 29-33 | ATLQA | linker | 1-5 |
| 5 | 34-48 | AYYVGYLQPRTFLLK | surface_glycoprotein@Aruba(NC_045512@Aruba:+: | 260-274 |
| | | | 21563-25384) | |
| 5 | 49-53 | ATLQA | linker | 1-5 |
| 5 | 54-84 | YIWLGFIAGLIAIVMV | surface_glycoprotein@Aruba(NC_045512@Aruba:+: | 1211-1241 |
| | | TIMLCCMTSCCSCLK | 21563-25384) | |
| 5 | 85-89 | ATLQA | linker | 1-5 |
| 5 | 90-104 | ERFVSLAIDAYPLTK | RNA-dependent_RNA_polymerase(NC_045512:+: | 857-871 |
| | | | 13442-13468+13468-16236) | |
| 5 | 105-109 | ATLQA | linker | 1-5 |
| 5 | 110-117 | PSFLGRYM | nsp3(NC_045512:+:2720-8554) | 822-829 |
| 5 | 118-122 | ATLQA | linker | 1-5 |
| 5 | 123-142 | DDRCILHCANFNVLFS | RNA-dependent_RNA_polymerase(NC_045512:+: | 303-322 |
| | | TVFP | 13442-13468+13468-16236) | |
| 5 | 143-147 | ATLQA | linker | 1-5 |
| 5 | 148-155 | NNLVVMAY | nsp2(NC_045512:+:806-2719) | 413-420 |
| 5 | 156-160 | ATLQA | linker | 1-5 |
| 5 | 161-176 | FRELGVVHNQDVNLHS | RNA-dependent_RNA_polymerase(NC_045512:+: | 348-363 |
| | | | 13442-13468+13468-16236) | |
| 5 | 177-181 | ATLQA | linker | 1-5 |
| 5 | 182-191 | FEYVSQPFLM | surface_glycoprotein@Aruba(NC_045512@Aruba:+: | 164-173 |
| | | | 21563-25384) | |
| 5 | 192-196 | ATLQA | linker | 1-5 |
| 5 | 197-218 | NVVIKVCEFQFCNYPF | surface_glycoprotein@Brazil(NC_045512@Brazil:+: | 125-146 |
| | | LGVYYH | 21563-25384) | |
| 5 | 219-223 | ATLQA | linker | 1-5 |
| 5 | 224-231 | KAVFISPY | helicase(NC_045512:+:16237-18039) | 508-515 |
| 5 | 232-236 | ATLQA | linker | 1-5 |
| 5 | 237-254 | LNDLCFTNVYADSFVI | surface_glycoprotein(NC_045512:+:21563-25384) | 387-404 |
| | | RG | | |
| 5 | 255-259 | ATLQA | linker | 1-5 |
| 5 | 260-269 | DPIHSLRVCV | nsp3(NC_045512:+:2720-8554) | 339-348 |
| 5 | 270-274 | ATLQA | linker | 1-5 |
| 5 | 275-297 | LIAIVMVTIMLCCITS | surface_glycoprotein@Mozambique | 1220-1242 |
| | | CCSCLKG | (NC_045512@Mozambique:+:21563-25384) | |
| 5 | 298-302 | ATLQA | linker | 1-5 |
| 5 | 303-322 | SEAVEAPLVGTPVCIN | nsp2(NC_045512:+:806-2719) | 591-610 |
| | | GLML | | |
| 5 | 323-327 | ATLQA | linker | 1-5 |
| 5 | 328-342 | RTCCLCDRRATCFST | 3′-to-5′_exonuclease(NC_045512:+:18040-19620) | 205-219 |
| 5 | 343-347 | ATLQA | linker | 1-5 |
| 5 | 348-370 | RVDFCGKGYHLMSFPQ | surface_glycoprotein(NC_045512:+:21563-25384) | 1039-1061 |
| | | SAPHGVV | | |
| 5 | 371-375 | ATLQA | linker | 1-5 |
| 5 | 376-391 | GSNVFQTRAGCLIGAE | surface_glycoprotein(NC_045512:+:21563-25384) | 639-654 |
| 5 | 392-396 | ATLQA | linker | 1-5 |
| 5 | 397-404 | QIGVVREF | helicase(NC_045512:+:16237-18039) | 492-499 |
| 5 | 405-409 | ATLQA | linker | 1-5 |
| 5 | 410-419 | GTNLPLQLGF | 3′-to-5′_exonuclease(NC_045512:+:18040-19620) | 102-111 |
| 5 | 420-424 | ATLQA | linker | 1-5 |
| 5 | 425-439 | SYELQTPFEIKLAKK | nsp2(NC_045512:+:806-2719) | 68-82 |
| 5 | 440-444 | ATLQA | linker | 1-5 |
| 5 | 445-455 | FFSNVTWFHVS | surface_glycoprotein@Nigeria | 58-68 |
| | | | (NC_045512@Nigeria:+:21563-25384) | |
| 5 | 456-460 | ATLQA | linker | 1-5 |
| 5 | 461-475 | TYACWHHSIGFDYVY | 3′-to-5′_exonuclease(NC_045512:+:18040-19620) | 223-237 |
| 5 | 476-480 | ATLQA | linker | 1-5 |
| 5 | 481-500 | FCKLHNWNCVNCDTFC | nsp3(NC_045512:+:2720-8554) | 1626-1645 |
| | | AGST | | |
| 5 | 501-505 | ATLQA | linker | 1-5 |
| 5 | 506-520 | QIELKFNPPALQDAY | nsp3(NC_045512:+:2720-8554) | 867-881 |
| 5 | 521-525 | ATLQA | linker | 1-5 |
| 5 | 526-533 | FKLASHMY | nsp3(NC_045512:+:2720-8554) | 96-103 |
| 5 | 534-538 | ATLQA | linker | 1-5 |
| 5 | 539-563 | SDIDITFLKKDAPYIV | nsp3(NC_045512:+:2720-8554) | 454-478 |
| | | GDVVQEGVL | | |
| 5 | 564-568 | ATLQA | linker | 1-5 |
| 5 | 569-592 | PINLVRDLPQGFSVLE | surface_glycoprotein@Belgium | 205-228 |
| | | PLVDLPIG | (NC_045512@Belgium:+:21563-25384) | |
| 5 | 593-597 | ATLQA | linker | 1-5 |
| 5 | 598-607 | KQYGDCLGDI | surface_glycoprotein(NC_045512:+:21563-25384) | 835-844 |
| 5 | 608-612 | ATLQA | linker | 1-5 |
| 5 | 613-625 | LLNVPLHGTILTR | membrane_glycoprotein(NC_045512:+:26523-27191) | 119-131 |
| 5 | 626-630 | ATLQA | linker | 1-5 |
| 5 | 631-638 | SLIDLQEL | surface_glycoprotein(NC_045512:+:21563-25384) | 1196-1203 |
| 6 | 1-22 | INLVRDLPQGFSALEP | surface_glycoprotein@Aruba(NC_045512@Aruba:+: | 206-227 |
| | | LVDLPI | 21563-25384) | |
| 6 | 23-27 | ATLQA | linker | 1-5 |
| 6 | 28-41 | RNLQHRLYECLYRN | RNA-dependent_RNA_polymerase(NC_045512:+: | 721-734 |
| | | | 13442-13468+13468-16236) | |
| 6 | 42-46 | ATLQA | linker | 1-5 |
| 6 | 47-62 | FLVLLPLVSSQCVNLT | surface_glycoprotein@Aruba(NC_045512@Aruba:+: | 4-19 |
| | | | 21563-25384) | |
| 6 | 63-67 | ATLQA | linker | 1-5 |
| 6 | 68-78 | EQYVFCTVNAL | helicase(NC_045512:+:16237-18039) | 353-363 |
| 6 | 79-83 | ATLQA | linker | 1-5 |
| 6 | 84-95 | EVFAQVKQIYKT | surface_glycoprotein@Aruba(NC_045512@Aruba:+: | 776-787 |
| | | | 21563-25384) | |
| 6 | 96-100 | ATLQA | linker | 1-5 |
| 6 | 101-110 | DVVAIDYKHY | nsp3(NC_045512:+:2720-8554) | 1148-1157 |
| 6 | 111-115 | ATLQA | linker | 1-5 |
| 6 | 116-123 | KLGASQRV | membrane_glycoprotein(NC_045512:+:26523-27191) | 180-187 |
| 6 | 124-128 | ATLQA | linker | 1-5 |
| 6 | 129-137 | TENLLLYID | nsp3(NC_045512:+:2720-8554) | 432-440 |
| 6 | 138-142 | ATLQA | linker | 1-5 |
| 6 | 143-153 | KESVQTFFKLV | nsp2(NC_045512:+:806-2719) | 492-502 |
| 6 | 154-158 | ATLQA | linker | 1-5 |
| 6 | 159-174 | RKIFVDGVPFVVSTGY | RNA-dependent_RNA_polymerase(NC_045512:+: | 331-346 |
| | | | 13442-13468+13468-16236) | |
| 6 | 175-179 | ATLQA | linker | 1-5 |
| 6 | 180-197 | IKDLPKEITVATSRTL | membrane_glycoprotein(NC_045512:+:26523-27191) | 161-178 |
| | | SY | | |
| 6 | 198-202 | ATLQA | linker | 1-5 |
| 6 | 203-211 | SPDVDLADI | surface_glycoprotein@Chile(NC_045512@Chile:+: | 1161-1169 |
| | | | 21563-25384) | |
| 6 | 212-216 | ATLQA | linker | 1-5 |
| 6 | 217-226 | KQYGDCLGNI | surface_glycoprotein@Jordan(NC_045512@Jordan:+: | 831-840 |
| | | | 21563-25384) | |
| 6 | 227-231 | ATLQA | linker | 1-5 |
| 6 | 232-245 | SVASQSIIAYTMSL | surface_glycoprotein@Austria | 678-691 |
| | | | (NC_045512@Austria:+:21563-25384) | |
| 6 | 246-250 | ATLQA | linker | 1-5 |
| 6 | 251-270 | MTSCCSCLKGCCSCGS | surface_glycoprotein(NC_045512:+:21563-25384) | 1237-1256 |
| | | CCKF | | |
| 6 | 271-275 | ATLQA | linker | 1-5 |
| 6 | 276-292 | SAAYYVGYLQLRTFLL | surface_glycoprotein@Italy(NC_045512@Italy:+: | 258-274 |
| | | K | 21563-25384) | |
| 6 | 293-297 | ATLQA | linker | 1-5 |
| 6 | 298-305 | YDPLQPEL | surface_glycoprotein(NC_045512:+:21563-25384) | 1138-1145 |
| 6 | 306-310 | ATLQA | linker | 1-5 |
| 6 | 311-333 | GKIQDSLFSTASALGK | surface_glycoprotein@NorthMacedonia | 928-950 |
| | | LQDVVNQ | (NC_045512@NorthMacedonia:+:21563-25384) | |
| 6 | 334-338 | ATLQA | linker | 1-5 |
| 6 | 339-349 | IEELFYSYATH | 3′-to-5′_exonuclease(NC_045512:+:18040-19620) | 363-373 |
| 6 | 350-354 | ATLQA | linker | 1-5 |
| 6 | 355-373 | DKSAFVNLKQLPFFYY | 3′-to-5′_exonuclease(NC_045512:+:18040-19620) | 432-450 |
| | | SDS | | |
| 6 | 374-378 | ATLQA | linker | 1-5 |
| 6 | 379-386 | SVDCTMYI | surface_glycoprotein(NC_045512:+:21563-25384) | 735-742 |
| 6 | 387-391 | ATLQA | linker | 1-5 |
| 6 | 392-404 | NPVLPFNDGVYFA | surface_glycoprotein(NC_045512:+:21563-25384) | 81-93 |
| 6 | 405-409 | ATLQA | linker | 1-5 |
| 6 | 410-418 | AAAYYVGYL | surface_glycoprotein(NC_045512:+:21563-25384) | 262-270 |
| 6 | 419-423 | ATLQA | linker | 1-5 |
| 6 | 424-450 | FSASTSAFVETVKGLD | nsp2(NC_045512:+:806-2719) | 300-326 |
| | | YKAFKQIVESC | | |
| 6 | 451-455 | ATLQA | linker | 1-5 |
| 6 | 456-466 | RFQLHRSYLTP | surface_glycoprotein@Austria | 233-243 |
| | | | (NC_045512@Austria:+:21563-25384) | |
| 6 | 467-471 | ATLQA | linker | 1-5 |
| 6 | 472-484 | ANFCALILAYCNK | nsp3(NC_045512:+:2720-8554) | 890-902 |
| 6 | 485-489 | ATLQA | linker | 1-5 |
| 6 | 490-502 | WNVVRIKIVQMLS | 3′-to-5′_exonuclease(NC_045512:+:18040-19620) | 159-171 |
| 6 | 503-507 | ATLQA | linker | 1-5 |
| 6 | 508-521 | SYLFQHANLDSCKR | nsp3(NC_045512:+:2720-8554) | 915-928 |
| 6 | 522-526 | ATLQA | linker | 1-5 |
| 6 | 527-540 | GFNCYFPLQPYGFQ | surface_glycoprotein@SmallSouthAmerica | 481-494 |
| | | | (NC_045512@SmallSouthAmerica:+:21563-25384) | |
| 6 | 541-545 | ATLQA | linker | 1-5 |
| 6 | 546-553 | DSYFVVKR | RNA-dependent_RNA_polymerase | 67-74 |
| | | | (NC_045512:+:13442-13468+13468-16236) | |
| 6 | 554-558 | ATLQA | linker | 1-5 |
| 6 | 559-567 | FFSNVTWFH | surface_glycoprotein(NC_045512:+:21563-25384) | 58-66 |
| 6 | 568-572 | ATLQA | linker | 1-5 |
| 6 | 573-582 | VMCGGSLYVK | RNA-dependent_RNA_polymerase | 667-676 |
| | | | (NC_045512:+:13442-13468+13468-16236) | |
| 6 | 583-587 | ATLQA | linker | 1-5 |
| 6 | 588-597 | VTGLFKDCSK | 3′-to-5′_exonuclease(NC_045512:+:18040-19620) | 4-13 |
| 6 | 598-602 | ATLQA | linker | 1-5 |
| 6 | 603-623 | AVLYQGVNCTEVPFAI | surface_glycoprotein@SmallAfrica | 605-625 |
| | | HADQL | (NC_045512@SmallAfrica:+:21563-25384) | |
| 6 | 624-628 | ATLQA | linker | 1-5 |
| 6 | 629-639 | VVNAANVYLKH | nsp3(NC_045512:+:2720-8554) | 239-249 |

[0092] In certain embodiments, the vaccine comprises or expresses at least one of the concatemers of epitopes from SARS-COV-2 with intervening linker sequences (and as set forth in FIG. 17). In certain embodiments, the vaccine comprises or expresses at least two of the concatemers set forth below. In certain embodiments, the vaccine comprises or expresses three of the concatemers set forth below. In certain embodiments, the vaccine comprises or expresses four of the concatemers set forth below. In certain embodiments, the vaccine comprises or expresses five of the concatemers set forth below. In certain embodiments, the vaccine comprises or expresses all the concatemers set forth below.

TABLE 7

| | pos_in_ | | | pos_in_ |
|---|---|---|---|---|
| concat | concat | epitope | gene | gene |
| 1 | 1-20 | IRRPFLCCKCCYDHVISTSH | helicase(NC_045512:+:16237-18039) | 20-39 |
| 1 | 21-25 | ATLQA | linker | 1-5 |
| 1 | 26-39 | SDRVVFVLWAHGFE | 3′-to-5′_exonuclease(NC_045512:+:18040-19620) | 178-191 |
| 1 | 40-44 | ATLQA | linker | 1-5 |
| 1 | 45-63 | ANSVFNICQSVTANVNALL | RNA-dependent_RNA_polymerase@Croatia | 690-708 |
| | | | (NC_045512@Croatia:+:13442-13468+13468-16236) | |
| 1 | 64-68 | ATLQA | linker | 1-5 |
| 1 | 69-83 | SYFAIGLALYYPSAR | helicase@Austria | 289-303 |
| | | | (NC_045512@Austria:+:16237-18039) | |
| 1 | 84-88 | ATLQA | linker | 1-5 |
| 1 | 89-98 | VVADAVIKTL | nsp3(NC_045512:+:2720-8554) | 56-65 |
| 1 | 99-103 | ATLQA | linker | 1-5 |
| 1 | 104-115 | SSPDAVTAYNGY | nsp3(NC_045512:+:2720-8554) | 660-671 |
| 1 | 116-120 | ATLQA | linker | 1-5 |
| 1 | 121-131 | YELKHGTFTCA | nsp3(NC_045512:+:2720-8554) | 996-1006 |
| 1 | 132-136 | ATLQA | linker | 1-5 |
| 1 | 137-147 | EQYVFCTVNAL | helicase(NC_045512:+:16237-18039) | 353-363 |
| 1 | 148-152 | ATLQA | linker | 1-5 |
| 1 | 153-172 | SEAVEAPLVGTPVCINGLML | nsp2(NC_045512:+:806-2719) | 591-610 |
| 1 | 173-177 | ATLQA | linker | 1-5 |
| 1 | 178-185 | FNSVCRLM | helicase@Aruba(NC_045512@Aruba:+:16237-18039) | 422-429 |
| 1 | 186-190 | ATLQA | linker | 1-5 |
| 1 | 191-206 | SLRCGACIRRPFLCCK | helicase@Aruba(NC_045512@Aruba:+:16237-18039) | 13-28 |
| 1 | 207-211 | ATLQA | linker | 1-5 |
| 1 | 212-232 | KLSYGIAIVREVLSDRELHL | helicase@Colombia(NC_045512@Colombia:+: | 146-166 |
| | | S | 16237-18039) | |
| 1 | 233-237 | ATLQA | linker | 1-5 |
| 1 | 238-250 | ANFCALILAYCNK | nsp3(NC_045512:+:2720-8554) | 890-902 |
| 1 | 251-255 | ATLQA | linker | 1-5 |
| 1 | 256-267 | NIGCNHTGVVGE | nsp2(NC_045512:+:806-2719) | 250-261 |
| 1 | 268-272 | ATLQA | linker | 1-5 |
| 1 | 273-280 | YDFVVSKG | RNA-dependent_RNA_polymerase@Japan | 420-427 |
| | | | (NC_045512@Japan:+:13442-13468+13468-16236) | |
| 1 | 281-285 | ATLQA | linker | 1-5 |
| 1 | 286-295 | RHSLSHFVNL | nsp3(NC_045512:+:2720-8554) | 1697-1706 |
| 1 | 296-300 | ATLQA | linker | 1-5 |
| 1 | 301-351 | HFAIGLALYYPSARIVYTAC | helicase(NC_045512:+:16237-18039) | 290-340 |
| | | SHAAVDALCEKALKYLPIDK | | |
| | | CSRIIPARARV | | |
| 1 | 352-356 | ATLQA | linker | 1-5 |
| 1 | 357-364 | CLNRVCTN | nsp3(NC_045512:+:2720-8554) | 1342-1349 |
| 1 | 365-369 | ATLQA | linker | 1-5 |
| 1 | 370-396 | FSASTSAFVETVKGLDYKAF | nsp2(NC_045512:+:806-2719) | 300-326 |
| | | KQIVESC | | |
| 1 | 397-401 | ATLQA | linker | 1-5 |
| 1 | 402-411 | FEYVSQPFLM | surface_glycoprotein@Aruba(NC_045512@Aruba:+: | 164-173 |
| | | | 21563-25384) | |
| 1 | 412-416 | ATLQA | linker | 1-5 |
| 1 | 417-428 | FRSSVLHSTQDL | surface_glycoprotein@Aruba(NC_045512@Aruba:+: | 43-54 |
| | | | 21563-25384) | |
| 1 | 429-433 | ATLQA | linker | 1-5 |
| 1 | 434-446 | AFASEAARVVRSI | nsp2(NC_045512:+:806-2719) | 355-367 |
| 1 | 447-451 | ATLQA | linker | 1-5 |
| 1 | 452-471 | PINLVRGLPQGFSALEPLVD | surface_glycoprotein@Austria | 205-224 |
| | | | (NC_045512@Austria:+:21563-25384) | |
| 1 | 472-476 | ATLQA | linker | 1-5 |
| 1 | 477-495 | QVAVLYQDVNCTEVPVAIH | surface_glycoprotein@China | 607-625 |
| | | | (NC_045512@China:+:21563-25384) | |
| 1 | 496-500 | ATLQA | linker | 1-5 |
| 1 | 501-515 | TISVTTEILPVSMAK | surface_glycoprotein@Mexico | 719-733 |
| | | | (NC_045512@Mexico:+:21563-25384) | |
| 1 | 516-520 | ATLQA | linker | 1-5 |
| 1 | 521-531 | YDNLQFISLEI | helicase@Austria(NC_045512@Austria:+: | 582-592 |
| | | | 16237-18039) | |
| 1 | 532-536 | ATLQA | linker | 1-5 |
| 1 | 537-555 | KLNVGDYFVLTSHTVMPLS | helicase(NC_045512:+:16237-18039) | 218-236 |
| 1 | 556-560 | ATLQA | linker | 1-5 |
| 1 | 561-568 | SSNVANYQ | helicase@Austria(NC_045512@Austria:+: | 263-270 |
| | | | 16237-18039) | |
| 1 | 569-573 | ATLQA | linker | 1-5 |
| 1 | 574-588 | TYGVGYQPYRVVVLS | surface_glycoprotein@Australia | 496-510 |
| | | | (NC_045512@Australia:+:21563-25384) | |
| 1 | 589-593 | ATLQA | linker | 1-5 |
| 1 | 594-601 | TDAVDCAL | surface_glycoprotein(NC_045512:+:21563-25384) | 286-293 |
| 1 | 602-606 | ATLQA | linker | 1-5 |
| 1 | 607-629 | GKIQDSLFSTASALGKLQDV | surface_glycoprotein@NorthMacedonia | 928-950 |
| | | VNQ | (NC_045512@NorthMacedonia:+:21563-25384) | |
| 1 | 630-634 | ATLQA | linker | 1-5 |
| 1 | 635-643 | SPDVDLADI | surface_glycoprotein@Chile | 1161-1169 |
| | | | (NC_045512@Chile:+:21563-25384) | |
| 1 | 644-648 | ATLQA | linker | 1-5 |
| 1 | 649-656 | KLGASQRV | membrane_glycoprotein(NC_045512:+:26523-27191) | 180-187 |
| 1 | 657-661 | ATLQA | linker | 1-5 |
| 1 | 662-669 | AALQIPFA | surface_glycoprotein(NC_045512:+:21563-25384) | 892-899 |
| 1 | 670-674 | ATLQA | linker | 1-5 |
| 1 | 675-685 | HFPRKGVFVSN | surface_glycoprotein@SmallAsia | 1078-1088 |
| | | | (NC_045512@SmallAsia:+:21563-25384) | |
| 1 | 686-690 | ATLQA | linker | 1-5 |
| 1 | 691-702 | FRSSVLHSTRDL | surface_glycoprotein@Nigeria | 43-54 |
| | | | (NC_045512@Nigeria:+:21563-25384) | |
| 1 | 703-707 | ATLQA | linker | 1-5 |
| 1 | 708-724 | YADVFHLYLQYIRKLHD | RNA-dependent_RNA_polymerase(NC_045512:+: | 877-893 |
| | | | 13442-13468+13468-16236) | |
| 1 | 725-729 | ATLQA | linker | 1-5 |
| 1 | 730-739 | KSASVYYSQL | nsp3(NC_045512:+:2720-8554) | 1737-1746 |
| 1 | 740-744 | ATLQA | linker | 1-5 |
| 1 | 745-760 | ANSIVCRFDTRVLSNL | 3′-to-5′_exonuclease(NC_045512:+:18040-19620) | 394-409 |
| 1 | 761-765 | ATLQA | linker | 1-5 |
| 1 | 766-776 | DNVLSTFISAA | nsp3(NC_045512:+:2720-8554) | 1809-1819 |
| 1 | 777-781 | ATLQA | linker | 1-5 |
| 1 | 782-791 | ARDLICAQKF | surface_glycoprotein(NC_045512:+:21563-25384) | 846-855 |
| 2 | 1-8 | QIGVVREF | helicase(NC_045512:+:16237-18039) | 492-499 |
| 2 | 9-13 | ATLQA | linker | 1-5 |
| 2 | 14-24 | KGVQIPCTCGK | nsp3(NC_045512:+:2720-8554) | 963-973 |
| 2 | 25-29 | ATLQA | linker | 1-5 |
| 2 | 30-38 | TENLLLYID | nsp3(NC_045512:+:2720-8554) | 432-440 |
| 2 | 39-43 | ATLQA | linker | 1-5 |
| 2 | 44-56 | GVNLVAVPTGYVD | 3′-to-5′_exonuclease(NC_045512:+:18040-19620) | 114-126 |
| 2 | 57-61 | ATLQA | linker | 1-5 |
| 2 | 62-70 | AGFSLWVYK | 3′-to-5′_exonuclease(NC_045512:+:18040-19620) | 504-512 |
| 2 | 71-75 | ATLQA | linker | 1-5 |
| 2 | 76-107 | IMASLVLARKHTTCCSLSHR | RNA-dependent_RNA_polymerase(NC_045512:+: | 632-663 |
| | | FYRLANECAQVL | 13442-13468+13468-16236) | |
| 2 | 108-112 | ATLQA | linker | 1-5 |
| 2 | 113-120 | SINVANYQ | helicase@Mozambique | 263-270 |
| | | | (NC_045512@Mozambique:+:16237-18039) | |
| 2 | 121-125 | ATLQA | linker | 1-5 |
| 2 | 126-135 | LSVNPYVCNA | helicase@Cyprus(NC_045512@Cyprus:+:16237-18039) | 43-52 |
| 2 | 136-140 | ATLQA | linker | 1-5 |
| 2 | 141-148 | KAVFISPY | helicase(NC_045512:+:16237-18039) | 508-515 |
| 2 | 149-153 | ATLQA | linker | 1-5 |
| 2 | 154-163 | NYQCGHYKHI | nsp3(NC_045512:+:2720-8554) | 1012-1021 |
| 2 | 164-168 | ATLQA | linker | 1-5 |
| 2 | 169-179 | AVHECFVKRVD | 3′-to-5′_exonuclease(NC_045512:+:18040-19620) | 281-291 |
| 2 | 180-184 | ATLQA | linker | 1-5 |
| 2 | 185-200 | RKIFVDGVPFVVSTGY | RNA-dependent_RNA_polymerase(NC_045512:+: | 331-346 |
| | | | 13442-13468+13468-16236) | |
| 2 | 201-205 | ATLQA | linker | 1-5 |
| 2 | 206-220 | SYELQTPFEIKLAKK | nsp2(NC_045512:+:806-2719) | 68-82 |
| 2 | 221-225 | ATLQA | linker | 1-5 |
| 2 | 226-233 | GVYCCREH | nsp2(NC_045512:+:806-2719) | 47-54 |
| 2 | 234-238 | ATLQA | linker | 1-5 |
| 2 | 239-256 | IKVCEFQFCNDPFLGVYH | surface_glycoprotein@Aruba | 125-142 |
| | | | (NC_045512@Aruba:+:21563-25384) | |
| 2 | 257-261 | ATLQA | linker | 1-5 |
| 2 | 262-276 | ERFVSLAIDAYPLTK | RNA-dependent_RNA_polymerase(NC_045512:+: | 857-871 |
| | | | 13442-13468+13468-16236) | |
| 2 | 277-281 | ATLQA | linker | 1-5 |
| 2 | 282-301 | YVYLPYPDPSRILGAGCFVD | RNA-dependent_RNA_polymerase(NC_045512:+: | 826-845 |
| | | | 13442-13468+13468-16236) | |
| 2 | 302-306 | ATLQA | linker | 1-5 |
| 2 | 307-314 | PEHSLAEY | nsp2(NC_045512:+:806-2719) | 200-207 |
| 2 | 315-319 | ATLQA | linker | 1-5 |
| 2 | 320-330 | LRIAGHHLGRC | membrane_glycoprotein(NC_045512:+:26523-27191) | 149-159 |
| 2 | 331-335 | ATLQA | linker | 1-5 |
| 2 | 336-355 | FCKLHNWNCVNCDTFCAGST | nsp3(NC_045512:+:2720-8554) | 1626-1645 |
| 2 | 356-360 | ATLQA | linker | 1-5 |
| 2 | 361-368 | IETISLAG | nsp3(NC_045512:+:2720-8554) | 684-691 |
| 2 | 369-373 | ATLQA | linker | 1-5 |
| 2 | 374-384 | SELVIGAVILR | membrane_glycoprotein(NC_045512:+:26523-27191) | 136-146 |
| 2 | 385-389 | ATLQA | linker | 1-5 |
| 2 | 390-405 | LQSLQTYVTQQLIRAA | surface_glycoprotein(NC_045512:+:21563-25384) | 1001-1016 |
| 2 | 406-410 | ATLQA | linker | 1-5 |
| 2 | 411-423 | RSVASQSIIAYTM | surface_glycoprotein@Aruba | 681-693 |
| | | | (NC_045512@Aruba:+:21563-25384) | |
| 2 | 424-428 | ATLQA | linker | 1-5 |
| 2 | 429-437 | TEIYQAGST | surface_glycoprotein@Aruba | 466-474 |
| | | | (NC_045512@Aruba:+:21563-25384) | |
| 2 | 438-442 | ATLQA | linker | 1-5 |
| 2 | 443-456 | EGVVDYGARFYFYT | nsp3(NC_045512:+:2720-8554) | 595-608 |
| 2 | 457-461 | ATLQA | linker | 1-5 |
| 2 | 462-475 | LVLLPLVSSQCVNF | surface_glycoprotein@Brazil | 5-18 |
| | | | (NC_045512@Brazil:+:21563-25384) | |
| 2 | 476-480 | ATLQA | linker | 1-5 |
| 2 | 481-489 | AAAYYVGYL | surface_glycoprotein(NC_045512:+:21563-25384) | 262-270 |
| 2 | 490-494 | ATLQA | linker | 1-5 |
| 2 | 495-503 | VFSQCVNLT | surface_glycoprotein@Egypt | 11-19 |
| | | | (NC_045512@Egypt:+:21563-25384) | |
| 2 | 504-508 | ATLQA | linker | 1-5 |
| 2 | 509-520 | FNCYFPLQSYGF | surface_glycoprotein(NC_045512:+:21563-25384) | 486-497 |
| 2 | 521-525 | ATLQA | linker | 1-5 |
| 2 | 526-533 | SLIDLQEL | surface_glycoprotein(NC_045512:+:21563-25384) | 1196-1203 |
| 2 | 534-538 | ATLQA | linker | 1-5 |
| 2 | 539-553 | INAACRKVQHMVVKA | 3′-to-5′_exonuclease(NC_045512:+:18040-19620) | 305-319 |
| 2 | 554-558 | ATLQA | linker | 1-5 |
| 2 | 559-568 | SVLNDILARL | surface_glycoprotein@Aruba | 971-980 |
| | | | (NC_045512@Aruba:+:21563-25384) | |
| 2 | 569-573 | ATLQA | linker | 1-5 |
| 2 | 574-581 | RVEAFEYY | nsp3(NC_045512:+:2720-8554) | 810-817 |
| 2 | 582-586 | ATLQA | linker | 1-5 |
| 2 | 587-604 | CANFNVLFSTVFPPTSFG | RNA-dependent_RNA_polymerase@China | 310-327 |
| | | | (NC_045512@China:+:13442-13468+13468-16236) | |
| 2 | 605-609 | ATLQA | linker | 1-5 |
| 2 | 610-623 | GFNCYSPLQSYGFQ | surface_glycoprotein@Peru | 485-498 |
| | | | (NC_045512@Peru:+:21563-25384) | |
| 2 | 624-628 | ATLQA | linker | 1-5 |
| 2 | 629-646 | LFVVEVVDKYFDCYDGGC | RNA-dependent_RNA_polymerase(NC_045512:+: | 470-487 |
| | | | 13442-13468+13468-16236) | |
| 2 | 647-651 | ATLQA | linker | 1-5 |
| 2 | 652-661 | GNCDVVIGIV | surface_glycoprotein(NC_045512:+:21563-25384) | 1124-1133 |
| 2 | 662-666 | ATLQA | linker | 1-5 |
| 2 | 667-674 | SVDCTMYI | surface_glycoprotein(NC_045512:+:21563-25384) | 735-742 |
| 2 | 675-679 | ATLQA | linker | 1-5 |
| 2 | 680-687 | NNLVVMAY | nsp2(NC_045512:+:806-2719) | 413-420 |
| 2 | 688-692 | ATLQA | linker | 1-5 |
| 2 | 693-715 | TIATYCTGSIPCSVCLSGLD | nsp3(NC_045512:+:2720-8554) | 1459-1481 |
| | | SLD | | |
| 2 | 716-720 | ATLQA | linker | 1-5 |
| 2 | 721-735 | ARSVARQSIIAYTMS | surface_glycoprotein@Mozambique | 680-694 |
| | | | (NC_045512@Mozambique:+:21563-25384) | |
| 2 | 736-740 | ATLQA | linker | 1-5 |
| 2 | 741-751 | IEELFYSYATH | 3′-to-5′_exonuclease(NC_045512:+:18040-19620) | 363-373 |
| 2 | 752-756 | ATLQA | linker | 1-5 |
| 2 | 757-765 | EVFAQVKQI | surface_glycoprotein(NC_045512:+:21563-25384) | 780-788 |
| 2 | 766-770 | ATLQA | linker | 1-5 |
| 2 | 771-778 | EIYQAGSK | surface_glycoprotein@Mexico | 471-478 |
| | | | (NC_045512@Mexico:+:21563-25384) | |
| 2 | 779-783 | ATLQA | linker | 1-5 |
| 2 | 784-797 | APGCDVTDVTQLYL | helicase@Aruba(NC_045512@Aruba:+:16237-18039) | 52-65 |
| 3 | 1-12 | VRTNVYLAVFDK | nsp3(NC_045512:+:2720-8554) | 351-362 |
| 3 | 13-17 | ATLQA | linker | 1-5 |
| 3 | 18-40 | NHDLYCQVHGNAHVASCDAI | 3′-to-5′_exonuclease(NC_045512:+:18040-19620) | 256-278 |
| | | MTR | | |
| 3 | 41-45 | ATLQA | linker | 1-5 |
| 3 | 46-55 | ISDYDYYRYN | RNA-dependent_RNA_polymerase@Aruba | 450-459 |
| | | | (NC_045512@Aruba:+:13442-13468+13468-16236) | |
| 3 | 56-60 | ATLQA | linker | 1-5 |
| 3 | 61-86 | YRLANECAQVLSEMVMCGGS | RNA-dependent_RNA_polymerase@Australia | 653-678 |
| | | LYVKPG | (NC_045512@Australia:+:13442-13468+13468-16236) | |
| 3 | 87-91 | ATLQA | linker | 1-5 |
| 3 | 92-99 | SDDAVVCF | RNA-dependent_RNA_polymerase@Aruba | 759-766 |
| | | | (NC_045512@Aruba:+:13442-13468+13468-16236) | |
| 3 | 100-104 | ATLQA | linker | 1-5 |
| 3 | 105-112 | FNSVCRFM | helicase@Malaysia(NC_045512@Malaysia:+: | 422-429 |
| | | | 16237-18039) | |
| 3 | 113-117 | ATLQA | linker | 1-5 |
| 3 | 118-128 | VVNAANVYLKH | nsp3(NC_045512:+:2720-8554) | 239-249 |
| 3 | 129-133 | ATLQA | linker | 1-5 |
| 3 | 134-145 | TRAKVGILCIMS | helicase(NC_045512:+:16237-18039) | 566-577 |
| 3 | 146-150 | ATLQA | linker | 1-5 |
| 3 | 151-160 | VQQESPFVMM | nsp3(NC_045512:+:2720-8554) | 980-989 |
| 3 | 161-165 | ATLQA | linker | 1-5 |
| 3 | 166-188 | YLGGMSYYCKSHKLPISFPL | helicase@CostaRica(NC_045512@CostaRica:+: | 64-86 |
| | | CAN | 16237-18039) | |
| 3 | 189-193 | ATLQA | linker | 1-5 |
| 3 | 194-205 | VPVVDSYYSLLM | RNA-dependent_RNA_polymerase(NC_045512:+: | 231-242 |
| | | | 13442-13468+13468-16236) | |
| 3 | 206-210 | ATLQA | linker | 1-5 |
| 3 | 211-220 | VMCGGSLYVK | RNA-dependent_RNA_polymerase(NC_045512:+: | 667-676 |
| | | | 13442-13468+13468-16236) | |
| 3 | 221-225 | ATLQA | linker | 1-5 |
| 3 | 226-247 | INLVRDLPQGFSALEPLVDL | surface_glycoprotein@Aruba | 206-227 |
| | | PI | (NC_045512@Aruba:+:21563-25384) | |
| 3 | 248-252 | ATLQA | linker | 1-5 |
| 3 | 253-268 | TVLKKCKSAFYILPSI | nsp3(NC_045512:+:2720-8554) | 526-541 |
| 3 | 269-273 | ATLQA | linker | 1-5 |
| 3 | 274-283 | QEHYVRITGL | helicase(NC_045512:+:16237-18039) | 243-252 |
| 3 | 284-288 | ATLQA | linker | 1-5 |
| 3 | 289-296 | DSYFVVKR | RNA-dependent_RNA_polymerase(NC_045512:+: | 67-74 |
| | | | 13442-13468+13468-16236) | |
| 3 | 297-301 | ATLQA | linker | 1-5 |
| 3 | 302-313 | VTMPLGYVTHGL | nsp3(NC_045512:+:2720-8554) | 628-639 |
| 3 | 314-318 | ATLQA | linker | 1-5 |
| 3 | 319-357 | GCDVTDVTQLYLGGMSYYCK | helicase(NC_045512:+:16237-18039) | 54-92 |
| | | SHKPPISFPLCANGQVFGL | | |
| 3 | 358-362 | ATLQA | linker | 1-5 |
| 3 | 363-374 | EVFAQVKQIYKT | surface_glycoprotein@Aruba | 776-787 |
| | | | (NC_045512@Aruba:+:21563-25384) | |
| 3 | 375-379 | ATLQA | linker | 1-5 |
| 3 | 380-398 | ANSVFNICQAVTANVNALL | RNA-dependent_RNA_polymerase@Aruba | 690-708 |
| | | | (NC_045512@Aruba:+:13442-13468+13468-16236) | |
| 3 | 399-403 | ATLQA | linker | 1-5 |
| 3 | 404-413 | KQYGDCLGNI | surface_glycoprotein@Jordan | 831-840 |
| | | | (NC_045512@Jordan:+:21563-25384) | |
| 3 | 414-418 | ATLQA | linker | 1-5 |
| 3 | 419-439 | HPNCVNCLDDRCILHCANFN | RNA-dependent_RNA_polymerase@Australia | 295-315 |
| | | V | (NC_045512@Australia:+:13442-13468+13468-16236) | |
| 3 | 440-444 | ATLQA | linker | 1-5 |
| 3 | 445-456 | FSNVTWFHAIVS | surface_glycoprotein@Ghana | 59-70 |
| | | | (NC_045512@Ghana:+:21563-25384) | |
| 3 | 457-461 | ATLQA | linker | 1-5 |
| 3 | 462-472 | KESVQTFFKLV | nsp2(NC_045512:+:806-2719) | 492-502 |
| 3 | 473-477 | ATLQA | linker | 1-5 |
| 3 | 478-487 | AGAALQIPFA | surface_glycoprotein@Nigeria | 886-895 |
| | | | (NC_045512@Nigeria:+:21563-25384) | |
| 3 | 488-492 | ATLQA | linker | 1-5 |
| 3 | 493-509 | CSNLLLQYGSFCTQLNR | surface_glycoprotein(NC_045512:+:21563-25384) | 749-765 |
| 3 | 510-514 | ATLQA | linker | 1-5 |
| 3 | 515-532 | LNDLCFTNVYADSFVIRG | surface_glycoprotein(NC_045512:+:21563-25384) | 387-404 |
| 3 | 533-537 | ATLQA | linker | 1-5 |
| 3 | 538-550 | NFRVQPTESIVRF | surface_glycoprotein(NC_045512:+:21563-25384) | 317-329 |
| 3 | 551-555 | ATLQA | linker | 1-5 |
| 3 | 556-569 | RLNVGDYFVLTSHT | helicase@Austria(NC_045512@Austria:+: | 218-231 |
| | | | 16237-18039) | |
| 3 | 570-574 | ATLQA | linker | 1-5 |
| 3 | 575-599 | SDIDITFLKKDAPYIVGDVV | nsp3(NC_045512:+:2720-8554) | 454-478 |
| | | QEGVL | | |
| 3 | 600-604 | ATLQA | linker | 1-5 |
| 3 | 605-620 | DKYVRNLQHRLYECLY | RNA-dependent_RNA_polymerase@Aruba | 717-732 |
| | | | (NC_045512@Aruba:+:13442-13468+13468-16236) | |
| 3 | 621-625 | ATLQA | linker | 1-5 |
| 3 | 626-639 | GFNCYFPLQPYGFQ | surface_glycoprotein@SmallSouthAmerica | 481-494 |
| | | | (NC_045512@SmallSouthAmerica:+:21563-25384) | |
| 3 | 640-644 | ATLQA | linker | 1-5 |
| 3 | 645-661 | SAAYYVGYLQLRTFLLK | surface_glycoprotein@Italy | 258-274 |
| | | | (NC_045512@Italy:+:21563-25384) | |
| 3 | 662-666 | ATLQA | linker | 1-5 |
| 3 | 667-687 | ALCEKALKYFPIDKCSRIIP | helicase@Colombia(NC_045512@Colombia:+: | 316-336 |
| | | A | 16237-18039) | |
| 3 | 688-692 | ATLQA | linker | 1-5 |
| 3 | 693-706 | IKVCEFQFCNDPYY | surface_glycoprotein@CostaRica | 128-141 |
| | | | (NC_045512@CostaRica:+:21563-25384) | |
| 3 | 707-711 | ATLQA | linker | 1-5 |
| 3 | 712-731 | GYLPQNAVVKIYCPACHNSE | nsp2(NC_045512:+:806-2719) | 178-197 |
| 3 | 732-736 | ATLQA | linker | 1-5 |
| 3 | 737-744 | AEVQIDRL | surface_glycoprotein(NC_045512:+:21563-25384) | 989-996 |
| 3 | 745-749 | ATLQA | linker | 1-5 |
| 3 | 750-760 | YDKLQFTSLEI | helicase@Aruba(NC_045512@Aruba:+:16237-18039) | 582-592 |
| 3 | 761-765 | ATLQA | linker | 1-5 |
| 3 | 766-784 | LEILDITPCSFGGVSVITP | surface_glycoprotein(NC_045512:+:21563-25384) | 582-600 |
| 3 | 785-789 | ATLQA | linker | 1-5 |
| 3 | 790-804 | TYACWHHSIGFDYVY | 3′-to-5′_exonuclease(NC_045512:+:18040-19620) | 223-237 |
| 4 | 1-11 | YDKLQFISLEI | helicase@SouthAfrica(NC_045512@SouthAfrica:+: | 582-592 |
| | | | 16237-18039) | |
| 4 | 12-16 | ATLQA | linker | 1-5 |
| 4 | 17-24 | LPINVIVF | nsp3(NC_045512:+:2720-8554) | 1718-1725 |
| 4 | 25-29 | ATLQA | linker | 1-5 |
| 4 | 30-47 | SQHTMLVKQGDDYVYLPY | RNA-dependent_RNA_polymerase@Aruba | 814-831 |
| | | | (NC_045512@Aruba:+:13442-13468+13468-16236) | |
| 4 | 48-52 | ATLQA | linker | 1-5 |
| 4 | 53-66 | IRNLQHRLYECLYR | RNA-dependent_RNA_polymerase@Austria | 720-733 |
| | | | (NC_045512@Austria:+:13442-13468+13468-16236) | |
| 4 | 67-71 | ATLQA | linker | 1-5 |
| 4 | 72-82 | RQALLKTVQFC | RNA-dependent_RNA_polymerase@Aruba | 183-193 |
| | | | (NC_045512@Aruba:+:13442-13468+13468-16236) | |
| 4 | 83-87 | ATLQA | linker | 1-5 |
| 4 | 88-95 | YDKLVSSF | nsp3(NC_045512:+:2720-8554) | 365-372 |
| 4 | 96-100 | ATLQA | linker | 1-5 |
| 4 | 101-112 | AKLLHKPIVWHV | nsp3(NC_045512:+:2720-8554) | 1165-1176 |
| 4 | 113-117 | ATLQA | linker | 1-5 |
| 4 | 118-131 | SYLFQHANLDSCKR | nsp3(NC_045512:+:2720-8554) | 915-928 |
| 4 | 132-136 | ATLQA | linker | 1-5 |
| 4 | 137-145 | YDLSVVNAR | helicase(NC_045512:+:16237-18039) | 382-390 |
| 4 | 146-150 | ATLQA | linker | 1-5 |
| 4 | 151-158 | ARDLSLQF | nsp3(NC_045512:+:2720-8554) | 1652-1659 |
| 4 | 159-163 | ATLQA | linker | 1-5 |
| 4 | 164-181 | IKDLPKEITVATSRTLSY | membrane_glycoprotein(NC_045512:+:26523-27191) | 161-178 |
| 4 | 182-186 | ATLQA | linker | 1-5 |
| 4 | 187-201 | FKELLVYAADPAMHA | RNA-dependent_RNA_polymerase(NC_045512:+: | 368-382 |
| | | | 13442-13468+13468-16236) | |
| 4 | 202-206 | ATLQA | linker | 1-5 |
| 4 | 207-219 | KASCTLSEQLDFI | nsp2(NC_045512:+:806-2719) | 30-42 |
| 4 | 220-224 | ATLQA | linker | 1-5 |
| 4 | 225-232 | DMYSVMLT | RNA-dependent_RNA_polymerase@Malaysia | 901-908 |
| | | | (NC_045512@Malaysia:+:13442-13468+13468-16236) | |
| 4 | 233-237 | ATLQA | linker | 1-5 |
| 4 | 238-252 | YNLLKGCPAVAKHDF | RNA-dependent_RNA_polymerase@Poland | 87-101 |
| | | | (NC_045512@Poland:+:13442-13468+13468-16236) | |
| 4 | 253-257 | ATLQA | linker | 1-5 |
| 4 | 258-273 | VREVLSDRELHLSWEV | helicase(NC_045512:+:16237-18039) | 154-169 |
| 4 | 274-278 | ATLQA | linker | 1-5 |
| 4 | 279-286 | STFKCYGV | surface_glycoprotein@Aruba | 371-378 |
| | | | (NC_045512@Aruba:+:21563-25384) | |
| 4 | 287-291 | ATLQA | linker | 1-5 |
| 4 | 292-305 | ANPVLPFNDGVYFA | surface_glycoprotein@Austria | 77-90 |
| | | | (NC_045512@Austria:+:21563-25384) | |
| 4 | 306-310 | ATLQA | linker | 1-5 |
| 4 | 311-326 | FRELGVVHNQDVNLHS | RNA-dependent_RNA_polymerase(NC_045512:+: | 348-363 |
| | | | 13442-13468+13468-16236) | |
| 4 | 327-331 | ATLQA | linker | 1-5 |
| 4 | 332-354 | SHGKQVVSDIDYVPLKSATC | 3′-to-5′_exonuclease(NC_045512:+:18040-19620) | 454-476 |
| | | ITR | | |
| 4 | 355-359 | ATLQA | linker | 1-5 |
| 4 | 360-372 | YAKPFLNKVVSTT | nsp3(NC_045512:+:2720-8554) | 1323-1335 |
| 4 | 373-377 | ATLQA | linker | 1-5 |
| 4 | 378-396 | DKSAFVNLKQLPFFYYSDS | 3′-to-5′_exonuclease(NC_045512:+:18040-19620) | 432-450 |
| 4 | 397-401 | ATLQA | linker | 1-5 |
| 4 | 402-418 | PNFVFPLNSIIKTIQPR | nsp2(NC_045512:+:806-2719) | 91-107 |
| 4 | 419-423 | ATLQA | linker | 1-5 |
| 4 | 424-431 | REGVFVSN | surface_glycoprotein@Aruba | 1087-1094 |
| | | | (NC_045512@Aruba:+:21563-25384) | |
| 4 | 432-436 | ATLQA | linker | 1-5 |
| 4 | 437-446 | GTNLPLQLGF | 3′-to-5′_exonuclease(NC_045512:+:18040-19620) | 102-111 |
| 4 | 447-451 | ATLQA | linker | 1-5 |
| 4 | 452-473 | GYQPYRVVVLSFELLHAPAT | surface_glycoprotein(NC_045512:+:21563-25384) | 504-525 |
| | | VC | | |
| 4 | 474-478 | ATLQA | linker | 1-5 |
| 4 | 479-501 | LIAIVMVTIMLCCITSCCSC | surface_glycoprotein@Mozambique | 1220-1242 |
| | | LKG | (NC_045512@Mozambique:+:21563-25384) | |
| 4 | 502-506 | ATLQA | linker | 1-5 |
| 4 | 507-518 | TRAKVGILCITS | helicase@SouthKorea(NC_045512@SouthKorea:+: | 566-577 |
| | | | 16237-18039) | |
| 4 | 519-523 | ATLQA | linker | 1-5 |
| 4 | 524-531 | PSFLGRYM | nsp3(NC_045512:+:2720-8554) | 822-829 |
| 4 | 532-536 | ATLQA | linker | 1-5 |
| 4 | 537-544 | YDPLQPEL | surface_glycoprotein(NC_045512:+:21563-25384) | 1138-1145 |
| 4 | 545-549 | ATLQA | linker | 1-5 |
| 4 | 550-565 | FLVLLPLVSSQCVNLT | surface_glycoprotein@Aruba(NC_045512@Aruba:+: | 4-19 |
| | | | 21563-25384) | |
| 4 | 566-570 | ATLQA | linker | 1-5 |
| 4 | 571-579 | EPLLKGVKL | surface_glycoprotein@Croatia | 1258-1266 |
| | | | (NC_045512@Croatia:+:21563-25384) | |
| 4 | 580-584 | ATLQA | linker | 1-5 |
| 4 | 585-594 | TQNVLYENQK | surface_glycoprotein(NC_045512:+:21563-25384) | 912-921 |
| 4 | 595-599 | ATLQA | linker | 1-5 |
| 4 | 600-613 | ETKCTLKSFTVEKG | surface_glycoprotein@Aruba | 294-307 |
| | | | (NC_045512@Aruba:+:21563-25384) | |
| 4 | 614-618 | ATLQA | linker | 1-5 |
| 4 | 619-634 | FLVLLPLVSIQCVNLT | surface_glycoprotein@SmallNorthAmerica | 4-19 |
| | | | (NC_045512@SmallNorthAmerica:+:21563-25384) | |
| 4 | 635-639 | ATLQA | linker | 1-5 |
| 4 | 640-651 | FQTLLHRSYLTP | surface_glycoprotein@SmallAsia | 230-241 |
| | | | (NC_045512@SmallAsia:+:21563-25384) | |
| 4 | 652-656 | ATLQA | linker | 1-5 |
| 4 | 657-676 | MTSCCSCLKGCCSCGSCCKF | surface_glycoprotein(NC_045512:+:21563-25384) | 1237-1256 |
| 4 | 677-681 | ATLQA | linker | 1-5 |
| 4 | 682-691 | NEFYAYLRKH | RNA-dependent_RNA_polymerase | 743-752 |
| | | | (NC_045512:+:13442-13468+13468-16236) | |
| 4 | 692-696 | ATLQA | linker | 1-5 |
| 4 | 697-706 | KCAYWVPRAS | nsp2(NC_045512:+:806-2719) | 239-248 |
| 4 | 707-711 | ATLQA | linker | 1-5 |
| 4 | 712-723 | ISVTTEILPVSM | surface_glycoprotein(NC_045512:+:21563-25384) | 720-731 |
| 4 | 724-728 | ATLQA | linker | 1-5 |
| 4 | 729-738 | VTGLFKDCSK | 3′-to-5′_exonuclease(NC_045512:+:18040-19620) | 4-13 |
| 4 | 739-743 | ATLQA | linker | 1-5 |
| 4 | 744-757 | SVASQSIIAYTMSL | surface_glycoprotein@Austria | 678-691 |
| | | | (NC_045512@Austria:+:21563-25384) | |
| 4 | 758-762 | ATLQA | linker | 1-5 |
| 4 | 763-777 | RTCCLCDRRATCFST | 3′-to-5′_exonuclease(NC_045512:+:18040-19620) | 205-219 |
| 4 | 778-782 | ATLQA | linker | 1-5 |
| 4 | 783-793 | FFSNVTWFHVS | surface_glycoprotein@Nigeria | 58-68 |
| | | | (NC_045512@Nigeria:+:21563-25384) | |
| 5 | 1-22 | LGGMSYYCKSHKPSISFPLC | helicase@NewZealand(NC_045512@NewZealand:+: | 65-86 |
| | | AN | 16237-18039) | |
| 5 | 23-27 | ATLQA | linker | 1-5 |
| 5 | 28-37 | DPIHSLRVCV | nsp3(NC_045512:+:2720-8554) | 339-348 |
| 5 | 38-42 | ATLQA | linker | 1-5 |
| 5 | 43-50 | YDFAVSKG | RNA-dependent_RNA_polymerase@Aruba | 420-427 |
| | | | (NC_045512@Aruba:+:13442-13468+13468-16236) | |
| 5 | 51-55 | ATLQA | linker | 1-5 |
| 5 | 56-63 | FKLASHMY | nsp3(NC_045512:+:2720-8554) | 96-103 |
| 5 | 64-68 | ATLQA | linker | 1-5 |
| 5 | 69-76 | DQDVLFAY | RNA-dependent_RNA_polymerase@FrenchGuiana | 523-530 |
| | | | (NC_045512@FrenchGuiana:+: | |
| | | | 13442-13468+13468-16236) | |
| 5 | 77-81 | ATLQA | linker | 1-5 |
| 5 | 82-90 | ASQGLVASI | RNA-dependent_RNA_polymerase@Aruba | 771-779 |
| | | | (NC_045512@Aruba:+:13442-13468+13468-16236) | |
| 5 | 91-95 | ATLQA | linker | 1-5 |
| 5 | 96-115 | KLTCATTRQVVNVVTTKIAL | nsp3(NC_045512:+:2720-8554) | 1923-1942 |
| 5 | 116-120 | ATLQA | linker | 1-5 |
| 5 | 121-129 | SRELKVTFF | nsp3(NC_045512:+:2720-8554) | 1134-1142 |
| 5 | 130-134 | ATLQA | linker | 1-5 |
| 5 | 135-144 | DVVAIDYKHY | nsp3(NC_045512:+:2720-8554) | 1148-1157 |
| 5 | 145-149 | ATLQA | linker | 1-5 |
| 5 | 150-159 | ACIDCSARHI | nsp3(NC_045512:+:2720-8554) | 1872-1881 |
| 5 | 160-164 | ATLQA | linker | 1-5 |
| 5 | 165-174 | KACVEEVTTT | nsp3(NC_045512:+:2720-8554) | 415-424 |
| 5 | 175-179 | ATLQA | linker | 1-5 |
| 5 | 180-193 | RNLQHRLYECLYRN | RNA-dependent_RNA_polymerase(NC_045512:+: | 721-734 |
| 5 | 194-198 | ATLQA | linker13442-13468+13468-16236) | 1-5 |
| 5 | 199-208 | SVELKHFFFA | RNA-dependent_RNA_polymerase(NC_045512:+: | 434-443 |
| | | | 13442-13468+13468-16236) | |
| 5 | 209-213 | ATLQA | linker | 1-5 |
| 5 | 214-230 | AQSFLNRVCGVSAARLT | RNA-dependent_RNA_polymerase(NC_045512:+: | 4-20 |
| | | | 13442-13468+13468-16236) | |
| 5 | 231-235 | ATLQA | linker | 1-5 |
| 5 | 236-250 | QIELKFNPPALQDAY | nsp3(NC_045512:+:2720-8554) | 867-881 |
| 5 | 251-255 | ATLQA | linker | 1-5 |
| 5 | 256-270 | HYVRITGLYPTLNIL | helicase@Indonesia(NC_045512@Indonesia:+: | 245-259 |
| | | | 16237-18039) | |
| 5 | 271-275 | ATLQA | linker | 1-5 |
| 5 | 276-288 | IVKFISTCACEIV | nsp2(NC_045512:+:806-2719) | 468-480 |
| 5 | 289-293 | ATLQA | linker | 1-5 |
| 5 | 294-313 | DDRCILHCANFNVLFSTVFP | RNA-dependent_RNA_polymerase(NC_045512:+: | 303-322 |
| | | | 13442-13468+13468-16236) | |
| 5 | 314-318 | ATLQA | linker | 1-5 |
| 5 | 319-338 | LQKAAITILDGISQYSLRLI | nsp2(NC_045512:+:806-2719) | 382-401 |
| 5 | 339-343 | ATLQA | linker | 1-5 |
| 5 | 344-374 | YIWLGFIAGLIAIVMVTIML | surface_glycoprotein@Aruba(NC_045512@Aruba:+: | 1211-1241 |
| | | CCMTSCCSCLK | 21563-25384) | |
| 5 | 375-379 | ATLQA | linker | 1-5 |
| 5 | 380-398 | AIPINFTISVTTEILPVSM | surface_glycoprotein@Aruba(NC_045512@Aruba:+: | 709-727 |
| | | | 21563-25384) | |
| 5 | 399-403 | ATLQA | linker | 1-5 |
| 5 | 404-412 | FFSNVTWFH | surface_glycoprotein(NC_045512:+:21563-25384) | 58-66 |
| 5 | 413-417 | ATLQA | linker | 1-5 |
| 5 | 418-432 | RIIPARARVECFDKF | helicase@Aruba(NC_045512@Aruba:+:16237-18039) | 332-346 |
| 5 | 433-437 | ATLQA | linker | 1-5 |
| 5 | 438-448 | RFQLHRSYLTP | surface_glycoprotein@Austria | 233-243 |
| | | | (NC_045512@Austria:+:21563-25384) | |
| 5 | 449-453 | ATLQA | linker | 1-5 |
| 5 | 454-477 | PINLVRDLPQGFSVLEPLVD | surface_glycoprotein@Belgium | 205-228 |
| | | LPIG | (NC_045512@Belgium:+:21563-25384) | |
| 5 | 478-482 | ATLQA | linker | 1-5 |
| 5 | 483-498 | FSNVTWFHAIHVSGTN | surface_glycoprotein@Peru(NC_045512@Peru:+: | 59-74 |
| | | | 21563-25384) | |
| 5 | 499-503 | ATLQA | linker | 1-5 |
| 5 | 504-511 | TDVVYRAF | RNA-dependent_RNA_polymerase@Aruba | 28-35 |
| | | | (NC_045512@Aruba:+:13442-13468+13468-16236) | |
| 5 | 512-516 | ATLQA | linker | 1-5 |
| 5 | 517-529 | NPVLPFNDGVYFA | surface_glycoprotein(NC_045512:+:21563-25384) | 81-93 |
| 5 | 530-534 | ATLQA | linker | 1-5 |
| 5 | 535-547 | AIKCVPQADVEWK | 3′-to-5′_exonuclease(NC_045512:+:18040-19620) | 337-349 |
| 5 | 548-552 | ATLQA | linker | 1-5 |
| 5 | 553-565 | ATNVVIKVCEFQF | surface_glycoprotein(NC_045512:+:21563-25384) | 123-135 |
| 5 | 566-570 | ATLQA | linker | 1-5 |
| 5 | 571-593 | RVDFCGKGYHLMSFPQSAPH | surface_glycoprotein(NC_045512:+:21563-25384) | 1039-1061 |
| | | GVV | | |
| 5 | 594-598 | ATLQA | linker | 1-5 |
| 5 | 599-613 | EFQFCNYPFLGVYHK | surface_glycoprotein@Norway | 129-143 |
| | | | (NC_045512@Norway:+:21563-25384) | |
| 5 | 614-618 | ATLQA | linker | 1-5 |
| 5 | 619-639 | AVLYQGVNCTEVPFAIHADQ | surface_glycoprotein@SmallAfrica | 605-625 |
| | | L | (NC_045512@SmallAfrica:+:21563-25384) | |
| 5 | 640-644 | ATLQA | linker | 1-5 |
| 5 | 645-656 | HEFCSQHTMLVK | RNA-dependent_RNA_polymerase(NC_045512:+: | 810-821 |
| | | | 13442-13468+13468-16236) | |
| 5 | 657-661 | ATLQA | linker | 1-5 |
| 5 | 662-677 | EEIIYNLLKDCPAVAK | RNA-dependent_RNA_polymerase@Senegal | 83-98 |
| | | | (NC_045512@Senegal:+:13442-13468+13468-16236) | |
| 5 | 678-682 | ATLQA | linker | 1-5 |
| 5 | 683-694 | ALGKLQDVVNQN | surface_glycoprotein(NC_045512:+:21563-25384) | 944-955 |
| 5 | 695-699 | ATLQA | linker | 1-5 |
| 5 | 700-722 | TQLYLGGMSYYCKPHKPPIS | helicase@Iceland(NC_045512@Iceland:+: | 61-83 |
| | | FPL | 16237-18039) | |
| 5 | 723-727 | ATLQA | linker | 1-5 |
| 5 | 728-738 | VLYQGVNCTEV | surface_glycoprotein@Aruba | 606-616 |
| | | | (NC_045512@Aruba:+:21563-25384) | |
| 5 | 739-743 | ATLQA | linker | 1-5 |
| 5 | 744-753 | FCLEASFNYL | nsp3(NC_045512:+:2720-8554) | 1391-1400 |
| 5 | 754-758 | ATLQA | linker | 1-5 |
| 5 | 759-766 | PVLKGVKL | surface_glycoprotein@Aruba | 1259-1266 |
| | | | (NC_045512@Aruba:+:21563-25384) | |
| 5 | 767-771 | ATLQA | linker | 1-5 |
| 5 | 772-779 | FTGCVIAW | surface_glycoprotein(NC_045512:+:21563-25384) | 429-436 |
| 5 | 780-784 | ATLQA | linker | 1-5 |
| 5 | 785-794 | KQYGDCLGDI | surface_glycoprotein(NC_045512:+:21563-25384) | 835-844 |
| 6 | 1-18 | YNLLKDCPAVAKHDFFKF | RNA-dependent_RNA_polymerase@Aruba | 87-104 |
| | | | (NC_045512@Aruba:+:13442-13468+13468-16236) | |
| 6 | 19-23 | ATLQA | linker | 1-5 |
| 6 | 24-44 | HPNCVNCSDDRCILHCANFN | RNA-dependent_RNA_polymerase@Aruba | 295-315 |
| | | V | (NC_045512@Aruba:+:13442-13468+13468-16236) | |
| 6 | 45-49 | ATLQA | linker | 1-5 |
| 6 | 50-58 | ASQGLLASI | RNA-dependent_RNA_polymerase@Austria | 771-779 |
| | | | (NC_045512@Austria:+:13442-13468+13468-16236) | |
| 6 | 59-63 | ATLQA | linker | 1-5 |
| 6 | 64-80 | VPQEHYVRITGLYPTLN | helicase@Aruba(NC_045512@Aruba:+:16237-18039) | 241-257 |
| 6 | 81-85 | ATLQA | linker | 1-5 |
| 6 | 86-95 | ETFVTHSKGL | nsp2(NC_045512:+:806-2719) | 527-536 |
| 6 | 96-100 | ATLQA | linker | 1-5 |
| 6 | 101-117 | LECNVKTTEVVGDIILK | nsp3(NC_045512:+:2720-8554) | 1244-1260 |
| 6 | 118-122 | ATLQA | linker | 1-5 |
| 6 | 123-136 | TKDVVECLKLSHQS | nsp3(NC_045512:+:2720-8554) | 1830-1843 |
| 6 | 137-141 | ATLQA | linker | 1-5 |
| 6 | 142-151 | GVITHDVSSA | helicase(NC_045512:+:16237-18039) | 478-487 |
| 6 | 152-156 | ATLQA | linker | 1-5 |
| 6 | 157-165 | MPVCVETKA | nsp3(NC_045512:+:2720-8554) | 571-579 |
| 6 | 166-170 | ATLQA | linker | 1-5 |
| 6 | 171-184 | TCFSVAALTNNVAF | RNA-dependent_RNA_polymerase@Aruba | 394-407 |
| | | | (NC_045512@Aruba:+:13442-13468+13468-16236) | |
| 6 | 185-189 | ATLQA | linker | 1-5 |
| 6 | 190-205 | SRIIPARARVDCFDKF | helicase@Brazil(NC_045512@Brazil:+:16237-18039) | 331-346 |
| 6 | 206-210 | ATLQA | linker | 1-5 |
| 6 | 211-219 | RSVYPVASP | nsp2(NC_045512:+:806-2719) | 121-129 |
| 6 | 220-224 | ATLQA | linker | 1-5 |
| 6 | 225-242 | CANFNVLFSTVFPFTSFG | RNA-dependent_RNA_polymerase@Nigeria | 310-327 |
| | | | (NC_045512@Nigeria:+:13442-13468+13468-16236) | |
| 6 | 243-247 | ATLQA | linker | 1-5 |
| 6 | 248-261 | LKEILVTYNCCDDD | RNA-dependent_RNA_polymerase(NC_045512:+: | 142-155 |
| | | | 13442-13468+13468-16236) | |
| 6 | 262-266 | ATLQA | linker | 1-5 |
| 6 | 267-288 | SQHTMLVKQFDDYVYLPYPD | RNA-dependent_RNA_polymerase@Estonia | 814-835 |
| | | PS | (NC_045512@Estonia:+:13442-13468+13468-16236) | |
| 6 | 289-293 | ATLQA | linker | 1-5 |
| 6 | 294-301 | MADLVYAL | RNA-dependent_RNA_polymerase(NC_045512:+: | 124-131 |
| | | | 13442-13468+13468-16236) | |
| 6 | 302-306 | ATLQA | linker | 1-5 |
| 6 | 307-315 | VTANVNALL | RNA-dependent_RNA_polymerase(NC_045512:+: | 700-708 |
| | | | 13442-13468+13468-16236) | |
| 6 | 316-320 | ATLQA | linker | 1-5 |
| 6 | 321-340 | RAKHYVYIGDPAQLPAPRTL | helicase(NC_045512:+:16237-18039) | 392-411 |
| 6 | 341-345 | ATLQA | linker | 1-5 |
| 6 | 346-358 | WNVVRIKIVQMLS | 3′-to-5′_exonuclease(NC_045512:+:18040-19620) | 159-171 |
| 6 | 359-363 | ATLQA | linker | 1-5 |
| 6 | 364-383 | FPQSAPHGVVFLHVTYVPAQ | surface_glycoprotein@Aruba(NC_045512@Aruba:+: | 1048-1067 |
| | | | 21563-25384) | |
| 6 | 384-388 | ATLQA | linker | 1-5 |
| 6 | 389-403 | ISNCVADYSVLYNSA | surface_glycoprotein@Aruba(NC_045512@Aruba:+: | 354-368 |
| | | | 21563-25384) | |
| 6 | 404-408 | ATLQA | linker | 1-5 |
| 6 | 409-424 | TGLHPTQAPTHLSVDT | 3′-to-5′_exonuclease(NC_045512:+:18040-19620) | 16-31 |
| 6 | 425-429 | ATLQA | linker | 1-5 |
| 6 | 430-443 | FFSNVTWFHAIHVS | surface_glycoprotein@Bangladesh | 58-71 |
| | | | (NC_045512@Bangladesh:+:21563-25384) | |
| 6 | 444-448 | ATLQA | linker | 1-5 |
| 6 | 449-461 | ISSVLNDILSRLD | surface_glycoprotein@Bangladesh | 972-984 |
| | | | (NC_045512@Bangladesh:+:21563-25384) | |
| 6 | 462-466 | ATLQA | linker | 1-5 |
| 6 | 467-481 | EFQFCNDPFLGVYYH | surface_glycoprotein@Chile | 132-146 |
| | | | (NC_045512@Chile:+:21563-25384) | |
| 6 | 482-486 | ATLQA | linker | 1-5 |
| 6 | 487-501 | FSVAALTNNVAFQTV | RNA-dependent_RNA_polymerase(NC_045512:+: | 396-410 |
| | | | 13442-13468+13468-16236) | |
| 6 | 502-506 | ATLQA | linker | 1-5 |
| 6 | 507-519 | LLNVPLHGTILTR | membrane_glycoprotein(NC_045512:+:26523-27191) | 119-131 |
| 6 | 520-524 | ATLQA | linker | 1-5 |
| 6 | 525-543 | ECAQVLSETVMCGGSLYVK | RNA-dependent_RNA_polymerase@Aruba | 658-676 |
| | | | (NC_045512@Aruba:+:13442-13468+13468-16236) | |
| 6 | 544-548 | ATLQA | linker | 1-5 |
| 6 | 549-564 | GSNVFQTRAGCLIGAE | surface_glycoprotein(NC_045512:+:21563-25384) | 639-654 |
| 6 | 565-569 | ATLQA | linker | 1-5 |
| 6 | 570-579 | SSVLHSTQDF | surface_glycoprotein@Norway | 45-54 |
| | | | (NC_045512@Norway:+:21563-25384) | |
| 6 | 580-584 | ATLQA | linker | 1-5 |
| 6 | 585-610 | YRLANECAQVLSEIVMCGGS | RNA-dependent_RNA_polymerase@Canada | 653-678 |
| | | LYVKPG | (NC_045512@Canada:+:13442-13468+13468-16236) | |
| 6 | 611-615 | ATLQA | linker | 1-5 |
| 6 | 616-637 | NVVIKVCEFQFCNYPFLGVY | surface_glycoprotein@Brazil | 125-146 |
| | | YH | (NC_045512@Brazil:+:21563-25384) | |
| 6 | 638-642 | ATLQA | linker | 1-5 |
| 6 | 643-654 | YPSLETIQITIS | nsp3(NC_045512:+:2720-8554) | 1483-1494 |
| 6 | 655-659 | ATLQA | linker | 1-5 |
| 6 | 660-673 | TSGVGYQPYRVVVL | surface_glycoprotein@Aruba | 496-509 |
| | | | (NC_045512@Aruba:+:21563-25384) | |
| 6 | 674-678 | ATLQA | linker | 1-5 |
| 6 | 679-693 | VNCTEVPVAIHADQL | surface_glycoprotein(NC_045512:+:21563-25384) | 615-629 |
| 6 | 694-698 | ATLQA | linker | 1-5 |
| 6 | 699-706 | ISNCVADY | surface_glycoprotein(NC_045512:+:21563-25384) | 358-365 |
| 6 | 707-711 | ATLQA | linker | 1-5 |
| 6 | 712-723 | IEVQGYKSVNIT | nsp3(NC_045512:+:2720-8554) | 13-24 |
| 6 | 724-728 | ATLQA | linker | 1-5 |
| 6 | 729-742 | FGTVYEKLKPVLDW | nsp2(NC_045512:+:806-2719) | 437-450 |
| 6 | 743-747 | ATLQA | linker | 1-5 |
| 6 | 748-762 | AYYVGYLQPRTFLLK | surface_glycoprotein@Aruba | 260-274 |
| | | | (NC_045512@Aruba:+:21563-25384) | |
| 6 | 763-767 | ATLQA | linker | 1-5 |
| 6 | 768-787 | PINLVRGLPQGFSVLEPLVD | surface_glycoprotein@SmallAfrica | 209-228 |
| | | | (NC_045512@SmallAfrica:+:21563-25384) | |
| 6 | 788-792 | ATLQA | linker | 1-5 |
| 6 | 793-805 | FQTLLALHRSYLT | surface_glycoprotein@Aruba | 234-246 |
| | | | (NC_045512@Aruba:+:21563-25384) | |

[0093] In certain embodiments, the vaccine comprises or expresses at least one of the concatemers of epitopes from SARS-COV-2 with intervening linker sequences (and as set forth in FIG. 18). In certain embodiments, the vaccine comprises or expresses at least two of the concatemers set forth below. In certain embodiments, the vaccine comprises or expresses three of the concatemers set forth below. In certain embodiments, the vaccine comprises or expresses four of the concatemers set forth below. In certain embodiments, the vaccine comprises or expresses five of the concatemers set forth below. In certain embodiments, the vaccine comprises or expresses all the concatemers set forth below.

TABLE 8

| concatemer | pos_in_concatemer | epitope | gebe | pos_in_gene |
|---|---|---|---|---|
| 1 | 1-8 | TQALLQRQ | nucleocapsid_phosphoprotein@CostaRica(NC_045512@CostaRica: + : | 379-386 |
| | | | 28274-29533) | |
| 1 | 9-13 | ATLQA linker 1-5 | | |
| 1 | 14-28 | AYYVGYLQPRTFLLK | surface_glycoprotein@Aruba(NC_045512@Aruba: + : 21563-25384) | 260-274 |
| 1 | 29-33 | ATLQA linker 1-5 | | |
| 1 | 34-45 | FRSSVLHSTQDL | surface_glycoprotein@Aruba(NC_045512@Aruba: + : 21563-25384) | 43-54 |
| 1 | 46-50 | ATLQA linker 1-5 | | |
| 1 | 51-58 | PVLKGVKL | surface_glycoprotein@Aruba(NC_045512@Aruba: + : 21563-25384) | 1259-1266 |
| 1 | 59-63 | ATLQA linker 1-5 | | |
| 1 | 64-76 | SMWALIISVTSNY | nsp6@Aruba(NC_045512@Aruba: + : 10973-11842) | 160-172 |
| 1 | 77-81 | ATLQA linker 1-5 | | |
| 1 | 82-100 | QLSLSKGFHFVCNLLLFV | ORF3a_protein@Estonia(NC_045512@Estonia: + : 25393-26220) | 70-88 |
| 1 | 101-105 | ATLQA linker 1-5 | | |
| 1 | 106-114 | ISEHDYHIG | ORF3a_protein@NorthMacedonia(NC_045512@NorthMacedonia: + : 25393-26220) | 179-187 |
| 1 | 115-119 | ATLQA linker 1-5 | | |
| 1 | 120-129 | PFTINCQEPK | ORF8_protein@India(NC_045512@India: + : 27894-28259) | 85-94 |
| 1 | 130-134 | ATLQA linker 1-5 | | |
| 1 | 135-142 | WFTALTQH | nucleocapsid_phosphoprotein(NC_045512: + : 28274-29533) | 52-59 |
| 1 | 143-147 | ATLQA linker 1-5 | | |
| 1 | 148-156 | YGIIWVATE | nucleocapsid_phosphoprotein@SmallSouthAmerica(NC_045512@ | 128-136 |
| | | | SmallSouthAmerica: + : 28274-29533) | |
| 1 | 157-161 | ATLQA linker 1-5 | | |
| 1 | 162-203 | TTVAAFHQECSLQSCTQHQPYVVDDPCPIHFY | ORF8_protein@Bangladesh(NC_045512@Bangladesh: + : 27894-28259) | 11-52 |
| | | SKWYIRVGAR | | |
| 1 | 204-208 | ATLQA linker 1-5 | | |
| 1 | 209-222 | RLTLGVYDYLVSTQ | nsp6(NC_045512: + : 10973-11842) | 236-249 |
| 1 | 223-227 | ATLQA linker 1-5 | | |
| 1 | 228-242 | VCNLLLLFVTVYSHL | ORF3a_protein@Croatia(NC_045512@Croatia: + : 25393-26220) | 80-94 |
| 1 | 243-247 | ATLQA linker 1-5 | | |
| 1 | 248-255 | ISEHDYQI | ORF3a_protein@Aruba(NC_045512@Aruba: + : 25393-26220) | 179-186 |
| 1 | 256-260 | ATLQA linker 1-5 | | |
| 1 | 261-275 | YFTSDYYQLYSTQLI | ORF3a_protein@Indonesia(NC_045512@Indonesia: + : 25393-26220) | 206-220 |
| 1 | 276-280 | ATLQA linker 1-5 | | |
| 1 | 281-289 | AAAYYVGYL | surface_glycoprotein(NC_045512: + : 21563-25384) | 262-270 |
| 1 | 290-294 | ATLQA linker 1-5 | | |
| 1 | 295-304 | GLKLKDCVMY | nsp6@Peru(NC_045512@Peru: + : 10973-11842) | 107-116 |
| 1 | 305-309 | ATLQA linker 1-5 | | |
| 1 | 310-318 | VFSQCVNLT | surface_glycoprotein@Egypt(NC_045512@Egypt: + : 21563-25384) | 11-19 |
| 1 | 319-323 | ATLQA linker 1-5 | | |
| 1 | 324-344 | AVLYQGVNCTEVPFAIHADQL | surface_glycoprotein@SmallAfrica(NC_045512@SmallAfrica: + : 21563-25384) | 605-625 |
| 1 | 345-349 | ATLQA linker 1-5 | | |
| 1 | 350-372 | GKIQDSLFSTASALGKLQDVVNQ | surface_glycoprotein@NorthMacedonia(NC_045512@NorthMacedonia: + : | 928-950 |
| | | | 21563-25384) | |
| 1 | 373-377 | ATLQA linker 1-5 | | |
| 1 | 378-395 | IKVCEFQFCNDPFLGVYH | surface_glycoprotein@Aruba(NC_045512@Aruba: + : 21563-25384) | 125-142 |
| 1 | 396-400 | ATLQA linker 1-5 | | |
| 1 | 401-408 | KLGASQRV | membrane_glycoprotein(NC_045512: + : 26523-27191) | 180-187 |
| 1 | 409-413 | ATLQA linker 1-5 | | |
| 1 | 414-421 | FTGCVIAW | surface_glycoprotein(NC_045512: + : 21563-25384) | 429-436 |
| 1 | 422-426 | ATLQA linker 1-5 | | |
| 1 | 427-438 | FRSSVLHSTRDL | surface_glycoprotein@Nigeria(NC_045512@Nigeria: + : 21563-25384) | 43-54 |
| 1 | 439-443 | ATLQA linker 1-5 | | |
| 1 | 444-460 | EVTPSGTWLTYTGAIKL | nucleocapsid_phosphoprotein@Bulgaria(NC_045512@Bulgaria: + : | 323-339 |
| | | | 28274-29533) | |
| 1 | 461-465 | ATLQA linker 1-5 | | |
| 1 | 466-476 | VLYQGVNCTEV | surface_glycoprotein@Aruba(NC_045512@Aruba: + : 21563-25384) | 606-616 |
| 1 | 477-481 | ATLQA linker 1-5 | | |
| 1 | 482-491 | SSVLHSTQDF | surface_glycoprotein@Norway(NC_045512@Norway: + : 21563-25384) | 45-54 |
| 1 | 492-496 | ATLQA linker 1-5 | | |
| 1 | 497-513 | ILLNKHIDAYKTFPPIE | nucleocapsid_phosphoprotein@Chile(NC_045512@Chile: + : 28274-29533) | 351-367 |
| 1 | 514-518 | ATLQA linker 1-5 | | |
| 1 | 519-529 | SPGVFNPVMEP | ORF3a_protein@Colombia(NC_045512@Colombia: + : 25393-26220) | 252-262 |
| 1 | 530-534 | ATLQA linker 1-5 | | |
| 1 | 535-542 | ISNCVADY | surface_glycoprotein(NC_045512: + : 21563-25384) | 358-365 |
| 1 | 543-547 | ATLQA linker 1-5 | | |
| 1 | 548-569 | IAMACLVGLMWLSYFIASFRLF | membrane_glycoprotein@Aruba(NC_045512@Aruba: + : 26523-27191) | 82-103 |
| 1 | 570-574 | ATLQA linker 1-5 | | |
| 1 | 575-589 | IPIRASLPFGWLIVG | ORF3a_protein@Iceland(NC_045512@Iceland: + : 25393-26220) | 35-49 |
| 1 | 590-594 | ATLQA linker 1-5 | | |
| 1 | 595-606 | FQTLLHRSYLTP | surface_glycoprotein@SmallAsia(NC_045512@SmallAsia: + : 21563-25384) | 230-241 |
| 1 | 607-611 | ATLQA linker 1-5 | | |
| 1 | 612-632 | ELVIGAVILRGHLRIAGHHLG | membrane_glycoprotein@Aruba(NC_045512@Aruba: + : 26523-27191) | 137-157 |
| 1 | 633-637 | ATLQA linker 1-5 | | |
| 1 | 638-652 | TISVTTEILPVSMAK | membrane_glycoprotein@Mexico(NC_045512@Mexico: + : 26523-27191) | 719-733 |
| 2 | 1-37 | VAAGLEAPFLYLYALVYFLQSINFVRIIMRLW | ORF3a_protein@Aruba(NC_045512@Aruba: + : 25393-26220) | 97-133 |
| | | LCWKC | | |
| 2 | 38-42 | ATLQA linker 1-5 | | |
| 2 | 43-53 | LRIAGHHLGRC | membrane_glycoprotein(NC_045512: + : 26523-27191) | 149-159 |
| 2 | 54-58 | ATLQA linker 1-5 | | |
| 2 | 59-72 | FFSNVTWFHAIHVS | surface_glycoprotein@Bangledesh(NC_045512@Bangledesh: + : 21563-25384) | 58-71 |
| 2 | 73-77 | ATLQA linker 1-5 | | |
| 2 | 78-86 | SPDVDLADI | surface_glycoprotein@Chile(NC_045512@Chile: + : 21563-25384) | 1161-1169 |
| 2 | 87-91 | ATLQA linker 1-5 | | |
| 2 | 92-111 | FPQSAPHGVVFLHVTYVPAQ | surface_glycoprotein@Aruba(NC_045512@Aruba: + : 21563-25384) | 1048-1067 |
| 2 | 112-116 | ATLQA linker 1-5 | | |
| 2 | 117-127 | CLPFTINCQKP | ORF8_protein@Brazil(NC_045512@Brazil: + : 27894-28259) | 83-93 |
| 2 | 128-132 | ATLQA linker 1-5 | | |
| 2 | 133-161 | MWALIISVTSNYSGVVTIVMFLARGIVF | nsp6@SmallSouthAmerica(NC_045512@SmallSouthAmerical: + : | 160-188 |
| 2 | 162-166 | ATLQA linker 1-5 | | |
| 2 | 167-197 | YIWLGFIAGLIAIVMVTIMLCCMTSCCSCLK | surface_glycoprotein@Aruba(NC_045512@Aruba: + : 21563-25384) | 1121-1241 |
| 2 | 198-202 | ATLQA linker 1-5 | | |
| 2 | 203-234 | MMFVKHKHAFLCLFLLPSFATVAYFNMVYMPA | nsp6@Indonesia(NC_045512@Indonesia: + : 10973-11842) | 57-88 |
| 2 | 235-239 | ATLQA linker 1-5 | | |
| 2 | 240-255 | QLALSKGFHFVCNLLL | ORF3a_protein@Iceland(NC_045512@Iceland: + : 25393-26220) | 70-85 |
| 2 | 256-260 | ATLQA linker 1-5 | | |
| 2 | 261-272 | ALGKLQDVVNQN | surface_glycoprotein(NC_045512: + : 21563-25384) | 944-955 |
| 2 | 273-277 | ATLQA linker 1-5 | | |
| 2 | 278-290 | NPVLPFNDGVYFA | surface_glycoprotein(NC_045512: + : 21563-25384) | 81-93 |
| 2 | 291-295 | ATLQA linker 1-5 | | |
| 2 | 296-306 | AALALLLLDRL | nucleocapsid_phosphoprotein@Aruba(NC_045512@Aruba: + : 28274-29533) | 217-227 |
| 2 | 307-311 | ATLQA linker 1-5 | | |
| 2 | 312-319 | SSIVITSV | ORF3a_protein@Aruba(NC_045512@Aruba: + : 25393-26220) 165-172 | |
| 2 | 320-324 | ATLQA linker 1-5 | 1-5 | |
| 2 | 325-338 | ESVVKDCVVLHSYF | ORF3a_protein@CostaRica(NC_045512@CostaRica: + : 25393-26220) | 194-207 |
| 2 | 339-343 | ATLQA linker 1-5 | | |
| 2 | 344-355 | SVFQSASKIITL | ORF3a_protein@Iceland(NC_045512@Iceland: + : 25393-26220) | 54-65 |
| 2 | 356-360 | ATLQA linker 1-5 | | |
| 2 | 361-379 | CYDYCIPYNSVTSLIVITS | ORF3a_protein@Netherlands(NC_045512@Netherlands: + : 25393-26220) | 153-171 |
| 2 | 380-384 | ATLQA linker 1-5 | | |
| 2 | 385-395 | MMFVKHKHAFL | nsp6@Aruba(NC_045512@Aruba: + : 10973-11842) | 57-67 |
| 2 | 396-400 | ATLQA linker 1-5 | | |
| 2 | 401-408 | YDPLQPEL | surface_glycoprotein(NC_045512: + : 21563-25384) | 1138-1145 |
| 2 | 409-413 | ATLQA linker 1-5 | | |
| 2 | 414-435 | QLALSKGVHFVCNLLLLFVTVY | ORF3a_protein@Australia(NC_045512@Australia: + : 25393-26220) | 70-91 |
| 2 | 436-440 | ATLQA linker 1-5 | | |
| 2 | 441-454 | ETKCTLKSFTVEKG | surface_glycoprotein@Aruba(NC_045512@Aruba: + : 21563-25384) | 294-307 |
| 2 | 455-459 | ATLQA linker 1-5 | | |
| 2 | 460-467 | AALQIPFA | surface_glycoprotein(NC_045512: + : 21563-25384) | 892-899 |
| 2 | 468-472 | ATLQA linker 1-5 | | |
| 2 | 473-488 | FLVLLPLVSIQCVNLT | surface_glycoprotein@SmallNorthAmerica(NC_045512@SmallNorthAmerica: + : | 4-19 |
| | | | 21563-25384) | |
| 2 | 494-507 | ITTVAAFHQECSLQ | ORF8_protein@Aruba(NC_045512@Aruba: + : 27894-28259) | 10-23 |
| 2 | 508-512 | ATLQA linker 1-5 | | |
| 2 | 513-527 | ARSVARQSIIAYTMS | surface_glycoprotein@Mozambique(NC_045512@Mozambique: + : 21563-25384) | 680-694 |
| 2 | 528-532 | ATLQA linker 1-5 | | |
| 2 | 533-555 | KNPLLYDANYFLCCHTNCYDYCI | ORF3a_protein@Senegal(NC_045512@Senegal: + : 25393-26220) | 136-158 |
| 2 | 556-560 | ATLQA linker 1-5 | | |
| 2 | 561-579 | AIPINFTISVTTEILPVSM | surface_glycoprotein@Aruba(NC_045512@Aruba: + : 21563-25384) | 709-727 |
| 2 | 580-584 | ATLQA linker 1-5 | | |
| 2 | 585-595 | HFPRKGVFVSN | surface_glycoprotein@SmallAsia(NC_045512@SmallAsia: + : 21563-25384) | 1078- |
| 2 | 596-600 | ATLQA linker 1-5 | | |
| 2 | 601-617 | SAAYYVGYLQLRTFLLK | surface_glycoprotein@Italy(NC_045512@Italy: + : 21563-25384) | 258-274 |
| 2 | 618-622 | ATLQA linker 1-5 | | |
| 2 | 623-641 | QVAVLYQDVNCTEVPVAIH | surface_glycoprotein@China(NC_045512@China: + : 21563-25384) | 607-625 |
| 3 | 1-10 | YDANYFLCWH | ORF3a_protein(NC_045512: + : 25393-26220) | 141-150 |
| 3 | 11-15 | ATLQA linker 1-5 | | |
| 3 | 16-26 | SAPLIELCLDE | ORF8_protein@Russia(NC_045512@Russia: + : 27894-28259) | 54-64 |
| 3 | 27-31 | ATLQA linker 1-5 | | |
| 3 | 32-55 | TTVAAFHQECSLQLCTQHQPYVVD | ORF8_protein@USA(NC_045512@USA: + : 27894-28259) | 11-34 |
| 3 | 56-60 | ATLQA linker 1-5 | | |
| 3 | 61-74 | SVASQSIIAYTMSL | surface_glycoprotein@Austria(NC_045512@Austria: + : 21563-25384) | 678-691 |
| 3 | 75-79 | ATLQA linker 1-5 | | |
| 3 | 80-88 | EPLLKGVKL | surface_glycoprotein@Croatia(NC_045512@Croatia: + : 21563-25384) | 1258-1266 |
| 3 | 89-93 | ATLQA linker 1-5 | | |
| 3 | 94-109 | NYTVSCSPFTINCQEP | ORF8_protein@CostaRica(NC_045512@CostaRica: + : 27894-28259) | 78-93 |
| 3 | 110-114 | ATLQA linker 1-5 | | |
| 3 | 115-124 | PRWYFYYLGT | nucleocapsid_phosphoprotein@Aruba(NC_045512@Aruba: + : 28274-29533) | 106-115 |
| 3 | 125-129 | ATLQA linker 1-5 | | |
| 3 | 130-137 | SSIVITSG | ORF3a_protein@SouthKorea(NC_045512@SouthKorea: + : 25393-26220) | 165-172 |
| 3 | 138-142 | ATLQA linker 1-5 | | |
| 3 | 143-150 | ETQALPQR | nucleocapsid_phosphoprotein@SmallNorthAmerica(NC_04551@ | 378-385 |
| 3 | 151-155 | ATLQA linker 1-5 | | |
| 3 | 156-179 | LGSLVVRCSFYEDFLEYHDVRVVL | ORF8_protein(NC_045512: + : 27894-28259) | 95-118 |
| 3 | 180-184 | ATLQA linker 1-5 | | |
| 3 | 185-197 | FQTLLALHRSYLT | surface_glycoprotein@Aruba(NC_045512@Aruba: + : 21563-25384) | 234-246 |
| 3 | 198-202 | ATLQA linker 1-5 | | |
| 3 | 203-210 | EIYQAGSK | surface_glycoprotein@Mexico(NC_045512@Mexico: + : 21563-25384) | 471-478 |
| 3 | 211-215 | ATLQA linker 1-5 | | |
| 3 | 216-225 | GVGGKPCIKV | nsp6@Aruba(NC_045512@Aruba: + : 10973-11842) | 274-283 |
| 3 | 226-230 | ATLQA linker 1-5 | | |
| 3 | 231-252 | LLYDANYFLCWHINCYDYCIPY | ORF3a_protein@Estonia(NC_045512@Estonia: + : 25393-26220) | 139-160 |
| 3 | 253-257 | ATLQA linker 1-5 | | |
| 3 | 258-273 | GSNVFQTRAGCLIGAE | surface_glycoprotein(NC_045512: + : 21563-25384) | 639-654 |
| 3 | 274-278 | ATLQA linker 1-5 | | |
| 3 | 279-291 | ATNVVIKVCEFQF | surface_glycoprotein(NC_045512: + : 21563-25384) | 123-135 |
| 3 | 292-296 | ATLQA linker 1-5 | | |
| 3 | 297-309 | NFRVQPTESIVRF | surface_glycoprotein(NC_045512: + : 21563-25384) | 317-329 |
| 3 | 310-314 | ATLQA linker 1-5 | | |
| 3 | 315-324 | ISEHDYQIGG | ORF3a_protein@FrenchGuiana(NC_045512@FrenchGuiana: + : 25393-26220) | 179-188 |
| 3 | 325-329 | ATLQA linker 1-5 | | |
| 3 | 330-351 | SDFVRATATIPIQASLPFGWL | ORF3a_protein@Aruba(NC_045512@Aruba: + : 25393-26220) | 26-47 |
| 3 | 352-356 | ATLQA linker 1-5 | | |
| 3 | 357-364 | AEVQIDRL | surface_glycoprotein(NC_045512: + : 21563-25384) | 989-996 |
| 3 | 365-369 | ATLQA linker 1-5 | | |
| 3 | 370-386 | GVHFVCNLLLLFVIVYS | ORF3a_protein@Malaysia(NC_045512@Malaysia: + : 25393-26220) | 76-92 |
| 3 | 387-391 | ATLQA linker 1-5 | | |
| 3 | 392-412 | VMFLARGIVFMCVDYCPIFFI | nsp6@Cyprus(NC_045512@Cyprus: + : 10973-11842) | 179-199 |
| 3 | 413-417 | ATLQA linker 1-5 | | |
| 3 | 418-426 | EVFAQVKQI | surface_glycoprotein(NC_045512: + : 21563-25384) | 780-788 |
| 3 | 427-431 | ATLQA linker 1-5 | | |
| 3 | 432-445 | ANPVLPFNDGVYFA | surface_glycoprotein@Austria(NC_045512@Austria: + : 21563-25384) | 77-90 |
| 3 | 446-450 | ATLQA linker 1-5 | | |
| 3 | 451-466 | AFKLNIKLLGVGGKPC | nsp6(NC_045512: + : 10973-11842) | 268-283 |
| 3 | 467-471 | ATLQA linker 1-5 | | |
| 3 | 472-485 | GFNCYFPLQPYGFQ | surface_glycoprotein@SmallSouthAmerica(NC_045512@SmallSouthAmerica: + : | 481-494 |
| 3 | 486-490 | ATLQA linker 1-5 | | |
| 3 | 491-511 | QWNLVIGFLFLTWICLLQFAY | membrane_glycoprotein@Aruba(NC_045512@Aruba: + : 26523-27191) | 19-39 |
| 3 | 512-516 | ATLQA linker 1-5 | | |
| 3 | 517-534 | VTTVIFLARGIVFMCVEY | nsp6@Malaysia(NC_045512@Malaysia: + : 10973-11842) | 179-196 |
| 3 | 535-539 | ATLQA linker 1-5 | | |
| 3 | 540-556 | LFFFLYENAFLPFVMGI | nsp6@SmallSouthAmerica(NC_045512@SmallSouthAmerica: + : 10973-11842) | 33-49 |
| 3 | 557-561 | ATLQA linker 1-5 | | |
| 3 | 562-573 | FSNVTWFHAIVS | surface_glycoprotein@Ghana(NC_045512@Ghana: + : 21563-25384) | 59-70 |
| 3 | 574-578 | ATLQA linker 1-5 | | |
| 3 | 579-606 | FTSDYYQLYSTQLSTYTGVEHVTFFIYN | ORF3a_protein@Latvia(NC_045512@Latvia: + : 25393-26220) | 207-234 |
| 3 | 607-611 | ATLQA linker 1-5 | | |
| 3 | 612-621 | SFKLKDCVMY | nsp6@Malaysia(NC_045512@Malaysia: + : 10973-11842) | 107-116 |
| 3 | 622-626 | ATLQA linker 1-5 | | |
| 3 | 627-641 | EFQFCNDPFLGVYYH | surface_glycoprotein@Chile(NC_045512@Chile: + : 21563-25384) | 132-146 |
| 4 | 1-23 | QLALSKGVYFVCNLLLLFVTVYS | ORF3a_protein@Aruba(NC_045512@Aruba: + : 25393-26220) | 70-92 |
| 4 | 24-28 | ATLQA inker | | |
| 4 | 29-36 | REGVFVSN | surface_glycoprotein@Aruba(NC_045512@Aruba: + : 21563-25384) | 1087-1094 |
| 4 | 37-41 | ATLQA linker 1-5 | | |
| 4 | 42-52 | RFQLHRSYLTP | surface_glycoprotein@Austria(NC_045512@Austria: + : 21563-25384) | 233-243 |
| 4 | 53-57 | ATLQA linker 1-5 | | |
| 4 | 58-70 | ISSVLNDILSRLD | surface_glycoprotein@Bangladesh(NC_045512@Bangladesh: + : 21563-25384) | 972-984 |
| 4 | 71-75 | ATLQA linker 1-5 | | |
| 4 | 76-90 | VDTSLSSLKLKDCVM | nsp6@Latvia(NC_045512@Latvia: + : 10973-11842) | 101-115 |
| 4 | 91-95 | ATLQA linker 1-5 | | |
| 4 | 96-104 | TEIYQAGST | surface_glycoprotein@Aruba(NC_045512@Aruba: + : 21563-25384) | 466-474 |
| 4 | 105-109 | ATLQA linker 1-5 | | |
| 4 | 110-134 | AAGLEAPFLYLYVLVYFLQSINFVR | ORF3a_protein@Norway(NC_045512@Norway: + : 25393-26220) | 98-122 |
| 4 | 135-139 | ATLQA linker 1-5 | | |
| 4 | 140-148 | KHWPQIAQF | nucleocapsid_phosphoprotein(NC_045512: + : 28274-29533) | 299-307 |
| 4 | 149-153 | ATLQA linker 1-5 | | |
| 4 | 154-161 | APLIELCV | ORF8_protien(NC_045512: + : 27894-28259) | 55-62 |
| 4 | 162-166 | ATLQA linker 1-5 | | |
| 4 | 167-188 | INLVRDLPQGFSALEPLVDLPI | surface_glycoprotein@Aruba(NC_045512@Aruba: + : 21563-25384) | 206-227 |
| 4 | 189-193 | ATLQA linker 1-5 | | |
| 4 | 194-201 | STFKCYGV | surface_glycoprotein@Aruba(NC_045512@Aruba: + : 21563-25384) | 371-378 |
| 4 | 202-206 | ATLQA linker 1-5 | | |
| 4 | 207-216 | KQYGDCLGNI | surface_glycoprotein@Jordan(NC_045512@Jordan: + : 21563-25384) | 831-840 |
| 4 | 217-221 | ATLQA linker 1-5 | | |
| 4 | 222-238 | CSNLLLQYGSFCTQLNR | surface_glycoprotein(NC_045512: + : 21563-25384) | 749-765 |
| 4 | 239-243 | ATLQA linker 1-5 | | |
| 4 | 244-263 | DANYFLCWHTNCYHYCIPYN | ORF3a_protein@Indonesia(NC_045512@Indonesia: + : 25393-26220) | 142-161 |
| 4 | 264-268 | ATLQA linker 1-5 | | |
| 4 | 269-291 | KEITVATSRTLSYYKLGASQRVA | membrane_glycoprotein@Aruba(NC_045512@Aruba: + : 26523-27191) | 166-188 |
| 4 | 292-296 | ATLQA linker 1-5 | | |
| 4 | 297-306 | LPFTINCQEL | ORF8_protien@Mozambique(NC_045512@Mozambique: + : 27894-28259) | 84-93 |
| 4 | 307-311 | ATLQA linker 1-5 | | |
| 4 | 312-320 | APLEILCVD | ORF8_protien@Bangladesh(NC_045512@Bangladesh: + : 27894-28259) | 55-63 |
| 4 | 321-325 | ATLQA linker 1-5 | | |
| 4 | 326-334 | DYYQLYSTQ | ORF3a_protein(NC_045512: + : 25393-26220) | 210-218 |
| 4 | 335-339 | ATLQA linker 1-5 | | |
| 4 | 340-358 | VKDCVLLHSYFTSDYYQLY | ORF3a_protein@Belgium(NC_045512@Belgium: + : 25393-26220) | 197-215 |
| 4 | 359-363 | ATLQA linker 1-5 | | |
| 4 | 364-373 | ARDLICAQKF | surface_glycoprotein(NC_045512: + : 21563-25384) | 846-855 |
| 4 | 374-378 | ATLQA linker 1-5 | | |
| 4 | 379-386 | SDFVRATA | ORF3a_protein(NC_045512: + : 25393-26220) | 26-33 |
| 4 | 387-391 | ATLQA linker 1-5 | | |
| 4 | 392-401 | SVLNDILARL | surface_glycoprotein@Aruba(NC_045512@Aruba: + : 21563-25384) | 971-980 |
| 4 | 402-406 | ATLQA linker 1-5 | | |
| 4 | 407-424 | FLYENAFLPFAMGVIAMS | nsp6@Mexico(NC_045512@Mexico: + : 10973-11842) | 36-53 |
| 4 | 425-429 | ATLQA linker 1-5 | | |
| 4 | 430-442 | LLNVPLHGTILTR | membrane_glycoprotein(NC_045512: + : 26523-27191) | 119-131 |
| 4 | 443-447 | ATLQA linker 1-5 | | |
| 4 | 448-469 | SDFVRATATIPIRALSPFGWLI | ORF3a_protein@Belgium(NC_045512@Belgium: + : 25393-26220) | 26-47 |
| 4 | 470-474 | ATLQA linker 1-5 | | |
| 4 | 475-503 | FLYIIKLIFLWLLWPVTLACFVLAAVYRI | membrane_glycoprotein@Aruba(NC_045512@Aruba: + : 26523-27191) | 45-73 |
| 4 | 504-508 | ATLQA linker 1-5 | | |
| 4 | 509-524 | FSNVTWFHAIHVSGTN | surface_glycoprotein@Peru(NC_045512@Peru: + : 21563-25384) | 59-74 |
| 4 | 525-529 | ATLQA linker 1-5 | | |
| 4 | 530-558 | TLQCIMLVYCFGYFCTCYFGLFCLLNRY | nsp6@Aruba(NC_045512@Aruba: + : 10973-11842) | 203-231 |
| 4 | 559-563 | ATLQA linker 1-5 | | |
| 4 | 564-586 | VAAGLEAPFFYLYALVYFLQSIN | ORF3a_protein@Ecuador(NC_045512@Ecuador: + : 25393-26220) | 97-119 |
| 4 | 587-591 | ATLQA linker 1-5 | | |
| 4 | 592-599 | TDAVDCAL | surface_glycoprotein(NC_045512: + : 21563-25384) | 286-293 |
| 4 | 600-604 | ATLQA linker 1-5 | | |
| 4 | 605-619 | EFQFCNUPFLGVYHK | surface_glycoprotein@Norway(NC_045512@Norway: + : 21563-25384) | 129-143 |
| 4 | 620-624 | ATLQA linker 1-5 | | |
| 4 | 625-634 | SPGVVNPVME | ORF3a_protein@Brazil(NC_045512@Brazil: + : 25393-26220) | 252-261 |
| 4 | 635-639 | ATLQA linker 1-5 | | |
| 4 | 640-659 | MTSCCSCLKGCCSCGSCCKF | surface_glycoprotein(NC_045512: + : 21563-25384) | 1237-1256 |
| 5 | 1-25 | KNPLLYDANYFLCWHTNCYDYCIPY | ORF3a_protein@Aruba(NC_045512@Aruba: + : 25393-26220) | 136-160 |
| 5 | 26-30 | ATLQA linker 1-5 | | |
| 5 | 31-41 | SELVIGAVILR | membrane_glycoprotein(NC_045512: + : 26523-27191) | 136-146 |
| 5 | 42-46 | ATLQA linker 1-5 | | |
| 5 | 47-60 | LVLLPLVSSQCVNF | surface_glycoprotein@Brazil(NC_045512@Brazil: + : 21563-25384) | 5-18 |
| 5 | 61-65 | ATLQA linker 1-5 | | |
| 5 | 66-74 | LKLKDCVMY | nsp6@Aruba(NC_045512@Aruba: + : 10973-11842) | 105-113 |
| 5 | 75-79 | ATLQA linker 1-5 | | |
| 5 | 80-99 | PINLVRGLPQGFSALEPLVD | surface_glycoprotein@Austria(NC_045512@Austria: + : 21563-25384) | 205-224 |
| 5 | 100-104 | ATLQA linker 1-5 | | |
| 5 | 105-112 | VVNPVMEP | ORF3a_protein(NC_045512: + : 25393-26220) | 255-262 |
| 5 | 113-117 | ATLQA linker 1-5 | | |
| 5 | 118-125 | EHVQIHTI | ORF3a_protein(NC_045512: + : 25393-26220) | 242-249 |
| 5 | 126-130 | ATLQA linker 1-5 | | |
| 5 | 131-140 | ALAAVFHNAS | ORF3a_protein@SmallSouthAmerica(NC_045512@SmallSouthAmerica: + : | 51-60 |
| | | | 25393-26220) | |
| 5 | 141-145 | ATLQA linker 1-5 | | |
| 5 | 146-164 | VKDCVVLHSYFTSDYYQLY | ORF3a_protein@Aruba(NC_045512@Aruba: + : 25393-26220) | 197-215 |
| 5 | 165-169 | ATLQA linker 1-5 | | |
| 5 | 170-184 | ALLAVFHSASKIITL | ORF3a_protein@Aruba(NC_045512@Aruba: + : 25393-26220) | 51-65 |
| 5 | 185-189 | ATLQA linker 1-5 | | |
| 5 | 190-212 | TTVMFLARGIVFMCVEYCPIFFI | nsp6@Aruba(NC_045512@Aruba: + : 10973-11842) | 177-199 |
| 5 | 213-217 | ATLQA linker 1-5 | | |
| 5 | 218-240 | LIAIVMVTIMLCCITSCCSCLKG | surface_glycoprotein@Mozambique(NC_045512@Mozambique: + : 21563-25384) | 1220-1242 |
| 5 | 241-245 | ATLQA linker 1-5 | | |
| 5 | 246-260 | VNCTEVPVAIHADQL | surface_glycoprotein(NC_045512: + : 21563-25384) | 615-629 |
| 5 | 261-265 | ATLQA linker 1-5 | | |
| 5 | 266-282 | INFVRIIMRLWLCLKCR | ORF3a_protein@Mozambique(NC_045512@Mozambique: + : 25393-26220) | 118-134 |
| 5 | 283-287 | ATLQA linker 1-5 | | |
| 5 | 288-301 | KHWPQAIQFAPSAS | nucleocapsid_phosphoprotein@Australia(NC_045512@Australia: + : | 299-312 |
| | | | 28274-29533) | |
| 5 | 302-306 | ATLQA linker 1-5 | | |
| 5 | 307-320 | IKVCEFQFCNDPYY | surface_glycoprotein@CostaRica(NC_045512@CostaRica: + : 21563-25384) | 128-141 |
| 5 | 321-325 | ATLQA linker 1-5 | | |
| 5 | 326-340 | ALLAVFQSASKIITL | ORF3a_protein@Bangladesh(NC_045512@Bangladesh: + : 25393-26220) | 51-65 |
| 5 | 341-345 | ATLQA linker 1-5 | | |
| 5 | 346-359 | LMNVLTLVYKVYYG | nsp6@Aruba(NC_045512@Aruba: + : 10973-11842) | 139-152 |
| 5 | 360-364 | ATLQA linker 1-5 | | |
| 5 | 365-373 | FFSNVTWFH | surface_glycoprotein(NC_045512: + : 21563-25384) | 58-66 |
| 5 | 374-378 | ATLQA linker 1-5 | | |
| 5 | 379-386 | SLIDLQEL | surface_glycoprotein(NC_045512: + : 21563-25384) | 1196-1203 |
| 5 | 387-391 | ATLQA linker 1-5 | | |
| 5 | 392-401 | GNCDVVIGIV | surface_glycoprotein(NC_045512: + : 21563-25384) | 1124-1133 |
| 5 | 402-406 | ATLQA linker 1-5 | | |
| 5 | 407-421 | TYGVGYQPYRVVVLS | surface_glycoprotein@Australia(NC_045512@Australia: + : 21563-25384) | 496-510 |
| 5 | 422-426 | ATLQA linker 1-5 | | |
| 5 | 427-442 | LMNVLTLFYKVYYGNA | nsp6@Chile(NC_045512@Chile: + : 10973-11842) | 142-157 |
| 5 | 443-447 | ATLQA linker 1-5 | | |
| 5 | 448-463 | FLVLLPLVSSQCVNLT | surface_glycoprotein@Aruba(NC_045512@Aruba: + : 21563-25384) | 4-19 |
| 5 | 464-468 | ATLQA linker 1-5 | | |
| 5 | 469-488 | PINLVRGLPQGFSVLEPLVD | surface_glycoprotein@SmallAfrica(NC_045512@SmallAfrica: + : 21563-25384) | 209-228 |
| 5 | 489-493 | ATLQA linker 1-5 | | |
| 5 | 494-508 | VEHVTFFIYNKIVDE | ORF3a_protein(NC_045512: + : 25393-26220) | 225-239 |
| 5 | 509-513 | ATLQA linker 1-5 | | |
| 5 | 514-531 | LNDLCFTNVYADSFVIRG | surface_glycoprotein(NC_045512: + : 21563-25384) | 387-404 |
| 5 | 532-536 | ATLQA linker 1-5 | | |
| 5 | 537-550 | TDTVVEHVTFFIYN | ORF3a_protein@CostaRica(NC_045512@CostaRica: + : 25393-26220) | 221-234 |
| 5 | 551-555 | ATLQA linker 1-5 | | |
| 5 | 556-571 | NYTVSCLPFTINCQEP | ORF8_protein@Bangladesh(NC_045512@Bangladesh: + : 27894-28259) | 78-93 |
| 5 | 572-576 | ATLQA linker 1-5 | | |
| 5 | 577-586 | KQYGDCLGDI | surface_glycoprotein(NC_045512: + : 21563-25384) | 835-844 |
| 5 | 587-591 | ATLQA linker 1-5 | | |
| 5 | 592-601 | AGAALQIPFA | surface_glycoprotein@Nigeria(NC_045512@Nigeria: + : 21563-25384) | 886-895 |
| 5 | 602-606 | ATLQA linker 1-5 | | |
| 5 | 607-616 | FEYVSQPFLM | surface_glycoprotein@Aruba(NC_045512@Aruba: + : 21563-25384) | 164-173 |
| 5 | 617-621 | ATLQA linker 1-5 | | |
| 5 | 622-635 | TDTCVEHVTFFIYN | ORF3a_protein@Luxembourg(NC_045512@Luxembourg: + : 25393-26220) | 221-234 |
| 6 | 1-12 | EVFAQVKQIYKT | surface_glycoprotein@Aruba(NC_045512@Aruba: + : 21563-25384) | 776-787 |
| 6 | 13-17 | ATLQA linker 1-5 | | |
| 6 | 18-35 | IKDLPKEITVATSRTLSY | membrane_glycoprotein(NC_045512: + : 26523-27191) | 161-178 |
| 6 | 36-40 | ATLQA linker 1-5 | | |
| 6 | 41-55 | ISNCVADYSVLYNSA | surface_glycoprotein@Aruba(NC_045512@Aruba: + : 21563-25384) | 354-368 |
| 6 | 56-60 | ATLQA linker 1-5 | | |
| 6 | 61-73 | RSVASQSIIAYTM | surface_glycoprotein@Aruba(NC_045512@Aruba: + : 21563-25384) | 681-693 |
| 6 | 74-78 | ATLQA linker 1-5 | | |
| 6 | 79-92 | TSGVGYQPYRVVVL | surface_glycoprotein@Aruba(NC_045512@Aruba: + : 21563-25384) | 496-509 |
| 6 | 93-97 | ATLQA linker 1-5 | | |
| 6 | 98-107 | NCYDYCIPYN | ORF3a_protein(NC_045512: + : 25393-26220) | 152-161 |
| 6 | 108-112 | ATLQA linker 1-5 | | |
| 6 | 113-129 | KDQVILLNKHIDAYKTF | nucleocapsid_phosphoprotein@Aruba(NC_045512@Aruba: + : 28274-29533) | 347-363 |
| 6 | 130-134 | ATLQA linker 1-5 | | |
| 6 | 135-157 | HQPYVVDDPCPIHFYSKWYIRVG | ORF8_protein(NC_045512: + : 27894-28259) | 28-50 |
| 6 | 158-162 | ATLQA linker 1-5 | | |
| 6 | 163-180 | QLALFKGVHFVCNLLLLF | ORF3a_protein@CostaRica(NC_045512@CostaRica: + : 25393-26220) | 70-87 |
| 6 | 181-185 | ATLQA linker 1-5 | | |
| 6 | 186-197 | DTSLKLKECVMY | nsp6@SmallAsia(NC_045512@SmallAsia: + : 10973-11842) | 102-113 |
| 6 | 198-202 | ATLQA linker 1-5 | | |
| 6 | 203-225 | RVDFCGKGYHLMSFPQSAPHGVV | surface_glycoprotein(NC_045512: + : 21563-25384) | 1039-1061 |
| 6 | 226-230 | ATLQA linker 1-5 | | |
| 6 | 231-249 | LEILDITPCSFGGVSVITP | surface_glycoprotein(NC_045512: + : 21563-25384) | 582-600 |
| 6 | 250-254 | ATLQA linker 1-5 | | |
| 6 | 255-277 | YALVYFLQSINFVIIIMRLWLCW | ORF3a_protein@Denmark(NC_045512@Denmark: + : 25393-26220) | 109-131 |
| 6 | 278-282 | ATLQA linker 1-5 | | |
| 6 | 283-298 | HWPQIAQFAPSASAFF | nucleocapsid_phosphoprotein@Aruba(NC_045512@Aruba: + : 28274-29533) | 300-315 |
| 6 | 299-303 | ATLQA linker 1-5 | | |
| 6 | 304-319 | LQSLQTYVTQQLIRAA | surface_glycoprotein(NC_045512: + : 21563-25384) | 1001-1016 |
| 6 | 320-324 | ATLQA linker 1-5 | | |
| 6 | 325-332 | TQALPHRQ | nucleocapsid_phosphoprotein@Mozambique(NC_045512@Mozambique: + : | 379-386 |
| | | | 28274-29533) | |
| 6 | 333-337 | ATLQA linker 1-5 | | |
| 6 | 338-345 | EVTPSGTW | nucleocapsid_phosphoprotein(NC_045512: + : 28274-29533) | 323-330 |
| 6 | 346-350 | ATLQA linker 1-5 | | |
| 6 | 351-362 | FNCYFPLQSYGF | surface_glycoprotein(NC_045512: + : 21563-25384) | 486-497 |
| 6 | 363-367 | ATLQA linker 1-5 | | |
| 6 | 368-383 | ATVAYFNMVYMPASWV | nsp6@Aruba(NC_045512@Aruba: + : 10973-11842) | 76-91 |
| 6 | 384-388 | ATLQA linker 1-5 | | |
| 6 | 389-396 | SVDCTMYI | surface_glycoprotein(NC_045512: + : 21563-25384) | 735-742 |
| 6 | 397-401 | ATLQA linker 1-5 | | |
| 6 | 402-415 | GFNCYSPLQSYGFQ | surface_glycoprotein@Peru(NC_045512@Peru: + : 21563-25384) | 485-498 |
| 6 | 416-420 | ATLQA linker 1-5 | | |
| 6 | 421-442 | NVVIKVCEFQFCNYPFLGVYYH | surface_glycoprotein@Brazil(NC_045512@Brazil: + : 21563-25384) | 125-146 |
| 6 | 443-447 | ATLQA linker 1-5 | | |
| 6 | 448-472 | VLVQSTQWSLFFFFYENAFLPFAMG | nsp6@Iceland(NC_045512@Iceland: + : 10973-11842) | 24-48 |
| 6 | 473-477 | ATLQA linker 1-5 | | |
| 6 | 478-499 | GYQPYRVVVLSFELLHAPATVC | surface_glycoprotein(NC_045512: + : 21563-25384) | 504-525 |
| 6 | 500-504 | ATLQA linker 1-5 | | |
| 6 | 505-529 | VLVQSTQWSLFFFLYENAFLPFAMG | nsp6@Aruba(NC_045512@Aruba: + : 10973-11842) | 24-48 |
| 6 | 530-534 | ATLQA linker 1-5 | | |
| 6 | 535-545 | FFSNVTWFHVS | surface_glycoprotein@Nigeria(NC_045512@Nigeria: + : 21563-25384) | 58-68 |
| 6 | 546-550 | ATLQA linker 1-5 | | |
| 6 | 551-564 | IHFYSKWYIRVGAK | ORF8_protein@Mozambique(NC_045512@Mozambique: + : 27894-28259) | 39-52 |
| 6 | 565-569 | ATLQA linker 1-5 | | |
| 6 | 570-579 | TQNVLYENQK | surface_glycoprotein(NC_045512: + : 21563-25384) | 912-921 |
| 6 | 580-584 | ATLQA linker 1-5 | | |
| 6 | 585-601 | INFVRIIMRLWLCCKCR | ORF3a_protein@Australia(NC_045512@Australia: + : 25393-26220) | 118-134 |
| 6 | 602-606 | ATLQA linker 1-5 | | |
| 6 | 607-630 | PINLVRDLPQGFSVLEPLVDLPIG | surface_glycoprotein@Belgium(NC_045512@Belgium: + : 21563-25384) | 205-228 |
| 6 | 631-635 | ATLQA linker 1-5 | | |
| 6 | 636-647 | ISVTTEILPVSM | surface_glycoprotein(NC_045512: + : 21563-25384) | 720-731 |

[0094] In certain embodiments, the vaccine comprises or expresses at least one of the concatemers of epitopes with intervening linker sequences (and as set forth in FIG. 19). In certain embodiments, the vaccine comprises or expresses at least two of the concatemers set forth below. In certain embodiments, the vaccine comprises or expresses three of the concatemers set forth below. In certain embodiments, the vaccine comprises or expresses all the concatemers set forth below.

TABLE 9

| concatemer | pos_in_concatemer | epitope | gene | pos_in_gene |
|---|---|---|---|---|
| 1 | 1-16 | YVRITGLYPTLNISYE | helicase@SmallNorthAmerical(NC_045512@SmallNorthAmerica: + : 16237-18039) | 246-261 |
| 1 | 17-26 | PRRARSVRYP linker 1-10 | | |
| 1 | 27-49 | TQLYLGGMSYYCKPHKPPISFPL | helicase@Iceland(NC_045512@Iceland: + : 16237-18039) | 61-83 |
| 1 | 50-59 | PRRARSVRYP linker 1-10 | | |
| 1 | 60-70 | HFPRKGVFVSN | surface_glycoprotein@SmallAsia(NC_045512@SmallAsia: + : 21563-25384) | 1078-1088 |
| 1 | 71-80 | PRRARSVRYP linker 1-10 | | |
| 1 | 81-90 | GTNLPLQLGF | 3′-to-5′_exonuclease(NC_045512: + : 10840-19620) | 102-111 |
| 1 | 91-100 | PRRARSVRYP linker 1-10 | | |
| 1 | 101-128 | FTSDYYQLYSTQLSTYTGVEHVTFFIYN | ORF3a_protein@Lativa(NC_045512@Lativa: + : 25393-26220) | 207-234 |
| 1 | 129-138 | PRRARSVRYP linker 1-10 | | |
| 1 | 139-154 | NYTVSCLPFTINCQEP | ORF8_protein@Bangladesh(NC_045512@Bangladesh: + : 27894-28259) | 78-93 |
| 1 | 155-164 | PRRARSVRYP linker 1-10 | | |
| 1 | 165-186 | LQKAAITILDGISQYSLRLI | nsp2(NC_045512: + : 806-2719) | 382-401 |
| 1 | 185-194 | PRRARSVRYP linker 1-10 | | |
| 1 | 195-204 | SVELKHFFFA | RNA-dependent_RNA-polymerase(NC_045512: + : 13442-13468 + 13468-16236) | 434-443 |
| 1 | 205-214 | PRRARSVRYP linker 1-10 | | |
| 1 | 215-228 | TDTVVEHVTFFIYN | ORF3a_protein@CostaRica(NC_045512@CostaRica: + : 25393-26220) | 221-234 |
| 1 | 229-238 | PRRARSVRYP linker 1-10 | | |
| 1 | 239-248 | NVAFNVVNKG | endoRNAse(NC_045512: + : 19621-20658) | 4-13 |
| 1 | 249-258 | PRRARSVRYP linker 1-10 | | |
| 1 | 259-275 | CSNLLLQYGSFCTQLNR | surface_glycoprotein(NC_045512: + : 21563-25384) | 749-765 |
| 1 | 276-285 | PRRARSVRYP linker 1-10 | | |
| 1 | 286-307 | SQHTMLVKQFDDYVYLPYPDPS | RNA-dependent_RNA_polymerase@Estonia(NC_045512@Estonia: + : | 814-835 |
| | | | 13442-13468 + 13468-16236) | |
| 1 | 308-317 | PRRARSVRYP linker 1-10 | | |
| 1 | 318-337 | GYLPQNAVVKIYCPACHNSE | nsp2(NC_045512: + : 806-2719) | 178-197 |
| 1 | 338-347 | PRRARSVRYP linker 1-10 | | |
| 1 | 348-359 | FQTLLHRSYLTP | surface_glycoprotein@SmallAsia(NC_045512@SmallAsia: + : 21563-25384) | 230-241 |
| 1 | 360-369 | PRRARSVRYP linker 1-10 | | |
| 1 | 370-408 | GCDVTDVTQLYLGGMSYYCKSHKPPISFPLCAN | helicase(NC_045512: + : 16237-18039) | 54-92 |
| | | GQVFGL | | |
| 1 | 409-418 | PRRARSVRYP linker 1-10 | | |
| 1 | 419-431 | IVKFISTCACEIV | nsp2(NC_045512: + : 806-2719) | 468-480 |
| 1 | 432-441 | PRRARSVRYP linker 1-10 | | |
| 1 | 442-450 | EPLLKGVKL | surface_glycoprotein@Croatia(NC_045512@Croatia: + : 21563-25384) | 1258-1266 |
| 1 | 451-460 | PRRARSVRYP linker 1-10 | | |
| 1 | 461-468 | ARDLSLQF | nsp3(NC_045512: + : 2720-8554) | 1652-1659 |
| 1 | 469-478 | PRRARSVRYP linker 1-10 | | |
| 1 | 479-488 | RHSLSHFVNL | nsp3(NC_045512: + : 2720-8554) | 1697-1706 |
| 1 | 489-498 | PRRARSVRYP linker 1-10 | | |
| 1 | 499-514 | VREVLSDRELHLSWEV | helicase(NC_045512: + : 16237-18039) | 154-169 |
| 1 | 515-524 | PRRARSVRYP linker 1-10 | | |
| 1 | 525-532 | REGVFVSN | surface_glycoprotein@Aruba(NC_045512@Aruba: + : 21563-25384) | 1087-1094 |
| 1 | 533-542 | PRRARSVRYP linker 1-10 | | |
| 1 | 543-553 | YELKHGTFTCA | nsp3(NC_045512: + : 2720-8554) | 996-1006 |
| 1 | 554-563 | PRRARSVRYP linker 1-10 | | |
| 1 | 564-579 | HWPQIAQFAPSASAFF | nucleocapsid_phosphoprotein@Aruba(NC_045512@Aruba: + : 28274-29533) | 300-315 |
| 1 | 580-589 | PRRARSVRYP linker 1-10 | | |
| 1 | 590-600 | KGVQIPCTCGK | nsp3(NC_045512: + : 2720-8554) | 963-973 |
| 1 | 601-610 | PRRARSVRYP linker 1-10 | | |
| 1 | 611-619 | TENLLLID | nsp3(NC_045512: + : 2720-8554) | 432-440 |
| 1 | 620-629 | PRRARSVRYP linker 1-10 | | |
| 1 | 630-646 | ILLNKHIDAYKTFPPIE | nucleocapsid_phosphoprotein@Chile(NC_045512@Chile: + : 28274-29533) | 351-367 |
| 1 | 647-656 | PRRARSVRYP linker 1-10 | | |
| 1 | 657-675 | AIPINFTISVTTEILPVSM | surface_glycoprotein@Aruba(NC_045512@Aruba: + : 21563-25384) | 709-727 |
| 1 | 676-685 | PRRARSVRYP linker 1-10 | | |
| 1 | 686-694 | KFPLKLRGT | 2′-O-ribose_methyltransferase(NC_045512: + : 20659-21552) | 249-257 |
| 1 | 695-704 | PRRARSVRYP linker 1-10 | | |
| 1 | 705-714 | SVLNDILARL | surface_glycoprotein@Aruba(NC_045512@Aruba: + : 21563-25384) | 971-980 |
| 1 | 715-724 | PRRARSVRYP linker 1-10 | | |
| 1 | 725-735 | DNVLSTFISAA | nsp3(NC_045512: + : 2720-8554) | 1809-1819 |
| 1 | 736-745 | PRRARSVRYP linker 1-10 | | |
| 1 | 746-755 | ACIDCSARHI | nsp3(NC_045512: + : 2720-8554) | 1872-1881 |
| 1 | 756-765 | PRRARSVRYP linker 1-10 | | |
| 1 | 766-775 | VQQESPFVMM | nsp3(NC_045512: + : 2720-8554) | 980-989 |
| 1 | 776-785 | PRRARSVRYP linker 1-10 | | |
| 1 | 786-800 | TISVTTEILPVSMAK | surface_glycoprotein@Mexico(NC_045512@Mexico: + : 21563-25384) | 719-733 |
| 1 | 801-810 | PRRARSVRYP linker 1-10 | | |
| 1 | 811-824 | TSACLVLAAECTIFK | nsp4(NC_045512: + : 8555-10054) | 147-160 |
| 1 | 825-834 | PRRARSVRYP linker 1-10 | | |
| 1 | 835-852 | LFVVEVVDKYFDCYDGGC | RNA-dependent_RNA_polymerase(NC_045512: + : 13442-13468 + 13468-16236) | 470-487 |
| 1 | 853-862 | PRRARSVRYP linker 1-10 | | |
| 1 | 863-876 | GFNCYSPLQSYGFQ | surface_glycoprotein@Peru(NC_045512@Peru: + : 21563-25384) | 485-498 |
| 1 | 877-886 | PRRARSVRYP linker 1-10 | | |
| 1 | 887-902 | ATVAYFNMVYMPASWV | nsp6@Aruba(NC_04551@Aruba: + : 10973-11842) | 76-91 |
| 1 | 903-912 | PRRARSVRYP linker 1-10 | | |
| 1 | 913-925 | AIKCVPQADVEWK | 3′-to-5′_exonuclease(NC_045512: + : 10840-19620) | 337-349 |
| 1 | 926-935 | PRRARSVRYP linker 1-10 | | |
| 1 | 936-952 | LFFFLYENAFLPFVMGI | nsp6@SmallSouthAmerica(NC_045512@SmallSouthAmerica: + : 10973-11842) | 33-49 |
| 1 | 953-962 | PRRARSVRYP linker 1-10 | | |
| 1 | 963-972 | ALLAVFHNAS | ORF3a_protein@SmallSouthAmerica(NC_045512@SmallSouthAmerica: + : | 51-60 |
| | | | 25393-26220) | |
| 1 | 973-982 | PRRARSVRYP linker 1-10 | | |
| 1 | 983-993 | YDKLQFTSLEI | helicase@Aruba(NC_045512@Aruba: + : 16237-18039) | 582-592 |
| 1 | 994-1003 | PRRARSVRYP linker 1-10 | | |
| 1 | 1004-1011 | SSNVANYQ | helicase@Austria(NC_045512@Austria: + : 16237-18039) | 263-270 |
| 1 | 1012-1021 | PRRARSVRYP linker 1-10 | | |
| 1 | 1022-1030 | SRELKVTFF | nsp3(NC_045512: + : 2720-8554) | 1134-1142 |
| 1 | 1031-1040 | PRRARSVRYP linker 1-10 | | |
| 1 | 1041-1082 | TTVAAFHQECSLQSCTQHQPYVVDDPCPIHFYS | ORF8_protein@Bangladesh(NC_045512@Bangladesh: + : 27894-28259) | 11-52 |
| | | KWYIRVGAR | | |
| 1 | 1083-1092 | PRRARSVRYP linker 1-10 | | |
| 1 | 1093-1100 | DMYSVMLT | RNA-dependent_RNA_polymerase@Malaysia(NC_045512@Malaysia: + : | 901-908 |
| | | | 13442-13468 + 13468-16236) | |
| 1 | 1101-1110 | PRRARSVRYP linker 1-10 | | |
| 1 | 1111-1126 | RKIFVDGVPFVVSTGY | RNA-dependent_RNA_polymerase(NC_045512: + : 13442-13468 + 13468-16236) | 331-346 |
| 1 | 1127-1136 | PRRARSVRYP linker 1-10 | | |
| 1 | 1137-1167 | YIWLGFIAGLIAIVMVTIMLCCMTSCCSCLK | surface_glycoprotein@Aruba(NC_045512@Aruba: + : 21563-25384) | 1211-1241 |
| 1 | 1168-1177 | PRRARSVRYP linker 1-10 | | |
| 1 | 1178-1192 | TYGVGYQPYRVVVLS | surface_glycoprotein@Australia(NC_045512@Australia: + : 21563-25384) | 496-510 |
| 1 | 1193-1202 | PRRARSVRYP linker 1-10 | | |
| 1 | 1203-1219 | KDQVILLNKHIDAYKTF | nucleocapsid_phosphoprotein@Aruba(NC_045512@Aruba: + : 28274-29533) | 347-363 |
| 1 | 1220-1229 | PRRARSVRYP linker 1-10 | | |
| 1 | 1230-1237 | KAVFISPY | helicase(NC_045512: + : 16237-18039) | 508-515 |
| 1 | 1238-1247 | PRRARSVRYP linker 1-10 | | |
| 1 | 1248-1260 | KLALGGSVAIKIT | 2′-O-ribose_methyltransferase(NC_045512: + : 20659-21552) | 160-172 |
| 1 | 1261-1270 | PRRARSVRYP linker 1-10 | | |
| 1 | 1271-1278 | YDKLVSSF | nsp3(NC_045512: + : 2720-8554) | 365-372 |
| 1 | 1279-1288 | PRRARSVRYP linker 1-10 | | |
| 1 | 1289-1302 | ITTVAAFHQECSLQ | ORF8_protein@Aruba(NC_045512@Aruba: + : 27894-28259) | 10-23 |
| 1 | 1303-1312 | PRRARSVRYP linker 1-10 | | |
| 1 | 1313-1328 | LMNVLTLFYKVYYGNA | nsp6@Chile(NC_045512@Chile: + : 10973-11842) | 142-157 |
| 1 | 1329-1338 | PRRARSVRYP linker 1-10 | | |
| 1 | 1339-1361 | HQPYVVDDPCPIHFYSKWYIRVG | ORF8_protein(NC_045512: + : 27894-28259) | 28-50 |
| 1 | 1362-1371 | PRRARSVRYP linker 1-10 | | |
| 1 | 1372-1395 | LGSLVVRCSFYEDFLEYHDVRVVL | ORF8_protein(NC_045512: + : 27894-28259) | 95-118 |
| 1 | 1396-1405 | PRRARSVRYP linker 1-10 | | |
| 1 | 1406-1415 | LPRVFSAVGN | nsp4(NC_045512: + : 8555-10054) | 122-131 |
| 1 | 1416-1425 | PRRARSVRYP linker 1-10 | | |
| 1 | 1426-1448 | QLALSKGVYFVCNLLLLFVTVYS | ORF3a_protein@Aruba(NC_045512@Aruba: + : 25393-26220) | 70-92 |
| 1 | 1449-1458 | PRRARSVRYP linker 1-10 | | |
| 1 | 1459-1466 | YDFAVSKG | RNA-dependent_RNA_polymerase@Aruba(NC_045512@Aruba: + : | 420-427 |
| | | | 13442-13468 + 13468-16236) | |
| 1 | 1467-1476 | PRRARSVRYP linker 1-10 | | |
| 1 | 1477-1502 | YRLANECAQVLSEIVMCGGSLYVKPG | RNA-dependent_RNA_polymerase@Canada(NC_045512@Canada: + : | 653-678 |
| | | | 13442-13468 + 13468-16236) | |
| 1 | 1503-1512 | PRRARSVRYP linker 1-10 | | |
| 1 | 1513-1520 | QIGVVREF | helicase(NC_045512: + : 16237-18039) | 492-499 |
| 1 | 1521-1530 | PRRARSVRYP linker 1-10 | | |
| 1 | 1531-1538 | YLKLRSDV | nsp4(NC_045512: + : 8555-10054) | 427-434 |
| 1 | 1539-1547 | PRRARSVRYP linker 1-10 | | |
| 1 | 1547-1567 | KLNVGDYFVLTSHTVMPLS | helicase(NC_045512: + : 16237-18039) | 218-236 |
| 1 | 1568-1577 | PRRARSVRYP linker 1-10 | | |
| 1 | 1578-1587 | SFLKLDCVMY | nsp6@Malaysia(NC_04551@Malaysia: + : 10973-11842) | 107-116 |
| 1 | 1588-1597 | PRRARSVRYP linker 1-10 | | |
| 1 | 1598-1607 | PRWYFYYLGT | nucleocapsid_phosphoprotein@Aruba(NC_045512@Aruba: + : 28274-29533) | 106-115 |
| 1 | 1608-1617 | PRRARSVRYP linker 1-10 | | |
| 1 | 1618-1636 | CYDYCIPYNSVTSLIVITS | ORF3a_protein@Netherlands(NC_045512@Netherlands: + : 25393-26220) | 153-171 |
| 1 | 1637-1646 | PRRARSVRYP linker 1-10 | | |
| 1 | 1647-1655 | MPVCVETKA | nsp3(NC_045512: + : 2720-8554) | 571-579 |
| 1 | 1656-1665 | PRRARSVRYP linker 1-10 | | |
| 1 | 1666-1674 | GVVQQLPET | endoRNAase(NC_045512: + : 184-192) | |
| 1 | 1675-1684 | PRRARSVRYP linker 1-10 | | |
| 1 | 1685-1697 | GVNLVAVPTGYVD | 3′-to-5′_exonuclease(NC_045512: + : 10840-19620) | 114-126 |
| 1 | 1698-1707 | PRRARSVRYP linker 1-10 | | |
| 1 | 1708-1719 | SVLLSMQGAVDI | nsp7(NC_045512: + : 11843-12091) | 57-68 |
| 1 | 1720-1729 | PRRARSVRYP linker 1-10 | | |
| 1 | 1730-1742 | RSVASQSIIAYTM | surface_glycoprotein@Aruba(NC_045512@Aruba: + : 21563-25384) | 681-693 |
| 1 | 1743-1752 | PRRARSVRYP linker 1-10 | | |
| 1 | 1753-1765 | VKGLQPSVGPKQA | endoRNAase(NC_045512: + : 184-192) | 148-160 |
| 1 | 1766-1775 | PRRARSVRYP linker 1-10 | | |
| 1 | 1776-1794 | QLSLSKGFHFVCNLLLLFV | ORF3a_protein@Estonia(NC_045512@Estonia: + : 25393-26220) | 70-88 |
| 1 | 1795-1804 | PRRARSVRYP linker 1-10 | | |
| 1 | 1805-1817 | ISSVLNDILSRLD | surface_glycoprotein@Bangladesh(NC_045512@Bangladesh: + : 21563-25384) | 972-984 |
| 1 | 1818-1827 | PRRARSVRYP linker 1-10 | | |
| 1 | 1828-1838 | VLYQGVNCTEV | surface_glycoprotein@Aruba(NC_045512@Aruba: + : 21563-25384) | 606-616 |
| 1 | 1839-1848 | PRRARSVRYP linker 1-10 | | |
| 1 | 1849-1860 | FSNVTWFHAIVS | surface_glycoprotein@Ghana(NC_045512@Ghana: + : 21563-25384) | 59-70 |
| 1 | 1861-1870 | PRRARSVRYP linker 1-10 | | |
| 1 | 1871-1884 | RLTLGVYDYLVSTQ | nsp6(NC_045512: + : 10973-11842) | 236-249 |
| 1 | 1885-1894 | PRRARSVRYP linker 1-10 | | |
| 1 | 1895-1905 | KESVQTFFKLV | nsp2(NC_045512: + : 806-2719) | 492-502 |
| 1 | 1906-1915 | PRRARSVRYP linker 1-10 | | |
| 1 | 1916-1937 | NVVIKVCEFQFCNYPFLGVYYH | surface_glycoprotein@Brazil(NC_045512@Brazil: + : 21563-25384) | 125-146 |
| 1 | 1938-1947 | PRRARSVRYP linker 1-10 | | |
| 1 | 1948-1955 | IETISLAG | nsp3(NC_045512: + : 2720-8554) | 684-691 |
| 1 | 1956-1965 | PRRARSVRYP linker 1-10 | | |
| 1 | 1966-1984 | ANSVFNICQAVTANVNALL | RNA-dependent_RNA_polymerase@Aruba(NC_045512@Aruba: + : | 690-708 |
| | | | 13442-13468 + 13468-16236) | |
| 1 | 1985-1994 | PRRARSVRYP linker 1-10 | | |
| 1 | 1995-2004 | NEVYAYLRKH | RNA-dependent_RNA_polymerase(NC_045512: + : 13442-13468 + 13468-16236) | 743-752 |
| 1 | 2005-2014 | PRRARSVRYP linker 1-10 | | |
| 1 | 2015-2034 | FPQSAPHGVVFLHVTYVPAQ | surface_glycoprotein@Aruba(NC_045512@Aruba: + : 21563-25384) | 1048-1067 |
| 1 | 2035-2044 | PRRARSVRYP linker 1-10 | | |
| 1 | 2045-2057 | NPVLPFNDGVYFA | surface_glycoprotein(NC_045512: + : 21563-25384) | 81-93 |
| 1 | 2058-2067 | PRRARSVRYP linker 1-10 | | |
| 1 | 2068-2077 | ISDYDYYRYN | RNA-dependent_RNA_polymerase@Aruba(NC_045512@Aruba: + : | 450-459 |
| | | | 13442-13468 + 13468-16236) | |
| 1 | 2078-2087 | PRRARSVRYP linker 1-10 | | |
| 1 | 2088-2095 | SLIDLQEL | surface_glycoprotein(NC_045512: + : 21563-25384) | 1196-1203 |
| 1 | 2096-2105 | PRRARSVRYP linker 1-10 | | |
| 1 | 2106-2127 | LGGMSYYCKSHKPSISFPLCAN | helicase@NewZealand(NC-045512@NewZealand: + : 16237-18039) | 65-86 |
| 1 | 2128-2137 | PRRARSVRYP linker 1-10 | | |
| 1 | 2138-2146 | IQLSSYSLF | 2′-O-ribose_methyltransferase(NC_045512: + : 20659-21552) | 237-245 |
| 1 | 2147-2156 | PRRARSVRYP linker 1-10 | | |
| 1 | 2157-2176 | YVYLPYPDPSRILGAGCFVD | RNA-dependent_RNA_polymerase(NC_045512: + : 13442-13468 + 13468-16236) | 826-845 |
| 1 | 2177-2186 | PRRARSVRYP linker 1-10 | | |
| 1 | 2187-2197 | ETICAPLTVFF | endoRNAase(NC_045512: + : 184-192) | 113-123 |
| 1 | 2198-2207 | PRRARSVRYP linker 1-10 | | |
| 1 | 2208-2226 | QVAVLYQDVNCTEVPVAIH | surface_glycoprotein@China(NC_045512@China: + : 21563-25384) | 607-625 |
| 1 | 2227-2236 | PRRARSVRYP linker 1-10 | | |
| 1 | 2239-2246 | VTGLFKDCSK | 3′-to-5′_exonuclease(NC_045512: + : 10840-19620) | 4-13 |
| 1 | 2247-2256 | PRRARSVRYP linker 1-10 | | |
| 1 | 2257-2270 | FFSNVTWFHAIHVS | surface_glycoprotein@Bangladehs(NC_045512@Bangladesh: + : 21563-25384) | 58-71 |
| 1 | 2271-2280 | PRRARSVRYP linker 1-10 | | |
| 1 | 2281-2296 | NYTVSCSPFTINCQEP | ORF8_protein@CostaRica(NC_045512@CostaRica: + : 27894-28259) | 78-93 |
| 1 | 2297-2306 | PRRARSVRYP linker 1-10 | | |
| 1 | 2307-2317 | MMFVKHKHAFL | nsp6@Aruba(NC_04551@Aruba: + : 10973-11842) | 57-67 |
| 1 | 2318-2327 | PRRARSVRYP linker 1-10 | | |
| 1 | 2328-2341 | GFNCYFPLQPYGFQ | surface_glycoprotein@SmallSouthAmerica(NC_045512@SmallSouthAmerica: + : | 481-494 |
| | | | 21563-25384) | |
| 1 | 2342-2351 | PRRARSVRYP linker 1-10 | | |
| 1 | 2352-2360 | AAAYYVGYL | surface_glycoprotein(NC_045512: + : 21563-25384) | 262-270 |
| 1 | 2361-2370 | PRRARSVRYP linker 1-10 | | |
| 1 | 2371-2385 | EFQFCNYPFLGVYHK | surface_glycoprotein@Norway(NC_045512@Norway: + : 21563-25384) | 129-143 |
| 1 | 2386-2395 | PRRARSVRYP linker 1-10 | | |
| 1 | 2396-2405 | DGYVMHANYI | 2′-O-ribose_methyltransferase(NC_045512: + : 20659-21552) | 220-229 |
| 1 | 2406-2415 | PRRARSVRYP linker 1-10 | | |
| 1 | 2416-2423 | EHVQIHTI | ORF3a_protein(NC_045512: + : 25393-26220) | 242-249 |
| 1 | 2424-2433 | PRRARSVRYP linker 1-10 | | |
| 1 | 2434-2448 | EFQFCNDPFLGVYYH | surface_glycoprotein@Chile(NC_045512@Chile: + : 21563-25384) | 132-146 |
| 1 | 2449-2458 | PRRARSVRYP linker 1-10 | | |
| 1 | 2459-2481 | SHGKQVVSDIDYVPLKSATCITR | 3′-to-5′_exonuclease(NC_045512: + : 10840-19620) | 454-476 |
| 1 | 2482-2491 | PRRARSVRYP linker 1-10 | | |
| 1 | 2492-2507 | SLRCGACIRRPFLCCK | helicase@Aruba(NC-045512@Aruba: + : 16237-18039) | 13-28 |
| 1 | 2508-2517 | PRRARSVRYP linker 1-10 | | |
| 1 | 2518-2526 | FFSNVTWFH | surface_glycoprotein@Chile(NC_045512@Chile: + : 21563-25384) | 58-66 |
| 2 | 1-11 | GPKVKYLYFIK | nsp9(NC_045512: + : 12686-13024) | 82-92 |
| 2 | 12-21 | PRRARSVRYP linker 1-10 | | |
| 2 | 22-33 | TEISFMLWCKDG | endoRNAase(NC_045512: + : 184-192) | 325-336 |
| 2 | 34-43 | PRRARSVRYP linker 1-10 | | |
| 2 | 44-61 | LNDLCFTNVYADSFVIRG | surface_glycoprotein(NC_045512: + : 21563-25384) | 387-404 |
| 2 | 62-71 | PRRARSVRYP linker 1-10 | | |
| 2 | 72-79 | WFTALTQH | nucleocapsid_phosphoprotein(NC_045512: + : 28274-29533) | 52-59 |
| 2 | 80-89 | PRRARSVRYP linker 1-10 | | |
| 2 | 90-99 | LSVNPYVCNA | helicase@Cyprus(NC-045512@Cyprus: + : 16237-18039) | 43-52 |
| 2 | 100-109 | PRRARSVRYP linker 1-10 | | |
| 2 | 110-124 | ARSVARQSIIAYTMS | surface_glycoprotein@Mozambiqye(NC_045512@Mozambique: + : 21563-25384) | 680-694 |
| 2 | 125-134 | PRRARSVRYP linker 1-10 | | |
| 2 | 135-149 | TYACWHHSIGFDYVY | 3′-to-5′_exonuclease(NC_045512: + : 10840-19620) | 223-237 |
| 2 | 150-159 | PRRARSVRYP linker 1-10 | | |
| 2 | 160-180 | VMFLARGIVFMCVDYCPIFFI | nsp6@Cyprus(NC_04551@Cyprus: + : 10973-11842) | 179-199 |
| 2 | 181-190 | PRRARSVRYP linker 1-10 | | |
| 2 | 191-200 | AGAALQIPFA | surface_glycoprotein@Nigeria(NC_045512@Nigeria: + : 21563-25384) | 886-895 |
| 2 | 201-210 | PRRARSVRYP linker 1-10 | | |
| 2 | 211-218 | PVLKGVKL | surface_glycoprotein@Aruba(NC_045512@Aruba: + : 21563-25384) | 1259-1266 |
| 2 | 219-228 | PRRARSVRYP linker 1-10 | | |
| 2 | 229-238 | SPGVVNPVME | ORF3a_protein@Brazil(NC_045512@Brazil: + : 25393-26220) | 252-261 |
| 2 | 239-248 | PRRARSVRYP linker 1-10 | | |
| 2 | 249-258 | KNTVCTVCGM | nsp10(NC_045512: + : 13025-13441) | 113-122 |
| 2 | 259-268 | PRRARSVRYP linker 1-10 | | |
| 2 | 269-289 | KLSYGIAIVREVLSDRELHLS | helicase@Colombia(NC-045512@Colombia: + : 16237-18039) | 146-166 |
| 2 | 290-299 | PRRARSVRYP linker 1-10 | | |
| 2 | 300-314 | VEHVTFFIYNKIVDE | ORF3a_protein(NC_045512: + : 25393-26220) | 225-239 |
| 2 | 315-324 | PRRARSVRYP linker 1-10 | | |
| 2 | 325-332 | NNLVVMAY | nsp2(NC_045512: + : 806-2719) | 413-420 |
| 2 | 333-342 | PRRARSVRYP linker 1-10 | | |
| 2 | 343-351 | VLGSLAATV | nsp9(NC_045512: + : 12686-13024) | 102-110 |
| 2 | 352-361 | PRRARSVRYP linker 1-10 | | |
| 2 | 362-370 | VFSQCVNLT | surface_glycoprotein@Egypt(NC_045512@Egypt: + : 21563-25384) | 11-19 |
| 2 | 371-380 | PRRARSVRYP linker 1-10 | | |
| 2 | 381-392 | IEVQGYKSVNIT | nsp3(NC_045512: + : 2720-8554) | 13-24 |
| 2 | 393-402 | PRRARSVRYP linker 1-10 | | |
| 2 | 403-410 | PEHSLAEY | nsp2(NC_045512: + : 806-2719) | 200-207 |
| 2 | 411-420 | PRRARSVRYP linker 1-10 | | |
| 2 | 421-433 | SMWALIISVTSNY | nsp6@Aruba(NC_04551@Aruba: + : 10973-11842) | 160-172 |
| 2 | 434-443 | PRRARSVRYP linker 1-10 | | |
| 2 | 444-462 | LEILDITPCSFGGVSVITP | surface_glycoprotein(NC_045512: + : 21563-25384) | 582-600 |
| 2 | 463-472 | PRRARSVRYP linker 1-10 | | |
| 2 | 473-480 | YDFVVSKG | RNA-dependent_RNA_polymerase@Japan(NC_045512@Japan: + : | 420-427 |
| | | | 13442-13468 + 13468-16236) | |
| 2 | 481-490 | PRRARSVRYP linker 1-10 | | |
| 2 | 491-498 | LPINVIVF | nsp3(NC_045512: + : 2720-8554) | 1718-1725 |
| 2 | 499-508 | PRRARSVRYP linker 1-10 | | |
| 2 | 509-530 | QLALSKGVHFVCNLLLLFVTVY | ORF3a_protein@Australia(NC_045512@Australia: + : 25393-26220) | 70-91 |
| 2 | 531-540 | PRRARSVRYP linker 1-10 | | |
| 2 | 541-565 | KNPLLYDANYFLCWHTNCYDYCIPY | ORF3a_protein@Aruba(NC_045512@Aruba: + : 25393-26220) | 136-160 |
| 2 | 566-575 | PRRARSVRYP linker 1-10 | | |
| 2 | 576-591 | FLVLLPLVSSQCVNLT | surface_glycoprotein@Aruba(NC_045512@Aruba: + : 21563-25384) | 4-19 |
| 2 | 592-601 | PRRARSVRYP linker 1-10 | | |
| 2 | 602-609 | RVEAFEYY | nsp3(NC_045512: + : 2720-8554) | 810-817 |
| 2 | 610-619 | PRRARSVRYP linker 1-10 | | |
| 2 | 620-633 | LSPVALRQMSCAAAG | nsp9(NC_045512: + : 12686-13024) | 4-17 |
| 2 | 634-643 | PRRARSVRYP linker 1-10 | | |
| 2 | 644-651 | VQLRVIGH | 3C-like_proteinase(NC_045512: + : 10055-10972) | 73-80 |
| 2 | 652-661 | PRRARSVRYP linker 1-10 | | |
| 2 | 662-685 | TTVAAFHQECSLQLCTQHQPYVVD | ORF8_protein@USA(NC_045512@USA: + : 27894-28259) | 11-34 |
| 2 | 686-695 | PRRARSVRYP linker 1-10 | | |
| 2 | 696-716 | HPNCVNCLDDRCILHCANFNV | RNA-dependent_RNA_polymerase@Australia(NC_045512@Australia: + : | 295-315 |
| | | | 13442-13468 + 13468-16236) | |
| 2 | 717-726 | PRRARSVRYP linker 1-10 | | |
| 2 | 727-740 | GASCCLYCRCHIDH | nsp10(NC_045512: + : 13025-13441) | 70-83 |
| 2 | 741-750 | PRRARSVRYP linker 1-10 | | |
| 2 | 751-760 | FCLEASFNYL | nsp3(NC_045512: + : 2720-8554) | 1391-1400 |
| 2 | 761-770 | PRRARSVRYP linker 1-10 | | |
| 2 | 771-779 | ISEHDYHIG | ORF3a_protein@NorthMacedonia(NC_045512@NorthMacedonia: + : 25393-26220) | 179-187 |
| 2 | 780-789 | PRRARSVRYP linker 1-10 | | |
| 2 | 790-800 | CLPFTINCQKP | ORF8_protein@Brazil(NC_045512@Brazil: + : 27894-28259) | 83-93 |
| 2 | 801-810 | PRRARSVRYP linker 1-10 | | |
| 2 | 811-818 | DVLYQPPQ | nsp4(NC_045512: + : 8555-10054) | 484-491 |
| 2 | 819-828 | PRRARSVRYP linker 1-10 | | |
| 2 | 829-842 | APGCDVTDVTQLYL | helicase@Aruba(NC-045512@Aruba: + : 16237-18039) | 52-65 |
| 2 | 843-852 | PRRARSVRYP linker 1-10 | | |
| 2 | 853-860 | SINVANYQ | helicase@Mozambique(NC-045512@Mozambique: + : 16237-18039) | 263-270 |
| 2 | 861-870 | PRRARSVRYP linker 1-10 | | |
| 2 | 871-881 | VVNAANVYLKH | nsp3(NC_045512: + : 2720-8554) | 239-249 |
| 2 | 882-891 | PRRARSVRYP linker 1-10 | | |
| 2 | 892-916 | VLVQSTQWSLFFFFYENAFLPFAMG | nsp6@Iceland(NC_04551@Iceland: + : 10973-11842) | 24-48 |
| 2 | 917-926 | PRRARSVRYP linker 1-10 | | |
| 2 | 927-939 | QCVQLHNDILLAK | nsp7(NC_045512: + : 11843-12091) | 31-43 |
| 2 | 940-949 | PRRARSVRYP linker 1-10 | | |
| 2 | 950-982 | YEPLTQDHVDILGPLSAQTGIAVLDMCASLKEL | 3C-like_proteinase(NC_045512: + : 10055-10972) | 239-271 |
| 2 | 983-992 | PRRARSVRYP linker 1-10 | | |
| 2 | 993-1006 | TDTCVEHVTFFIYN | ORF3a_protein@Luxembourg(NC_045512@Luxembourg: + : 25393-26220) | 221-234 |
| 2 | 1007-1016 | PRRARSVRYP linker 1-10 | | |
| 2 | 1017-1026 | YDANYFLCWH | ORF3a_protein(NC_045512: + : 25393-26220) | 141-150 |
| 2 | 1027-1036 | PRRARSVRYP linker 1-10 | | |
| 2 | 1037-1045 | APLIELCVD | ORF8_protein@Bangladesh(NC_045512@Bangladesh: + : 27894-28259) | 55-63 |
| 2 | 1046-1055 | PRRARSVRYP linker 1-10 | | |
| 2 | 1056-1073 | YNLLKDCPAVAKHDFFKV | RNA-dependent_RNA_polymerase@Aruba(NC_045512@Aruba: + : | 87-104 |
| | | | 13442-13468 + 13468-16236) | |
| 2 | 1074-1083 | PRRARSVRYP linker 1-10 | | |
| 2 | 1084-1098 | RTCCLCDRRATCFST | 3′-to-5′_exonuclease(NC_045512: + : 18040-19620) | 205-219 |
| 2 | 1099-1108 | PRRARSVRYP linker 1-10 | | |
| 2 | 1109-1123 | FSVAALTNNVAFQTV | RNA-dependent_RNA_polymerase(NC_045512: + : 13442-13468 + 13468-16236) | 396-410 |
| 2 | 1124-1133 | PRRARSVRYP linker 1-10 | | |
| 2 | 1134-1148 | ERFVSLAIDAYPLTK | RNA-dependent_RNA_polymerase(NC_045512: + : 13442-13468 + 13468-16236) | 857-871 |
| 2 | 1149-1159 | PRRARSVRYP linker 1-10 | | |
| 2 | 1159-1179 | ALCEKALKYFPIDKCSRIIPA | helicase@Colombia(NC-045512@Colombia: + : 16237-18039) | 316-336 |
| 2 | 1180-1189 | PRRARSVRYP linker 1-10 | | |
| 2 | 1190-1212 | RVDFCGKGYHLMSFPQSAPHGVV | surface_glycoprotein(NC_045512: + : 21563-25384) | 1039-1061 |
| 2 | 1213-1222 | PRRARSVRYP linker 1-10 | | |
| 2 | 1223-1239 | GVHFVCNLLLLFVIVYS | ORF3a_protein@Malaysia(NC_045512@Malaysia: + : 25393-26220) | 76-92 |
| 2 | 1240-1249 | PRRARSVRYP linker 1-10 | | |
| 2 | 1250-1261 | TFKVSIWNLDYI | ORF6_protein(NC_045512: + : 27202-27387) | 21-32 |
| 2 | 1262-1271 | PRRARSVRYP linker 1-10 | | |
| 2 | 1272-1285 | SDRVVFVLWAHGFE | 3′-to-5′_exonuclease(NC_045512: + : 18040-19620) | 178-191 |
| 2 | 1286-1295 | PRRARSVRYP linker 1-10 | | |
| 2 | 1296-1324 | FAFACPDGVKHVYQLRARSVSPKLFIRQE | ORF7a_protein(NC_045512: + : 27394-27759) | 63-91 |
| 2 | 1325-1334 | PRRARSVRYP linker 1-10 | | |
| 2 | 1335-1343 | RSVYPVASP | nsp2(NC_045512: + : 806-2719) | 121-129 |
| 2 | 1344-1353 | PRRARSVRYP linker 1-10 | | |
| 2 | 1354-1368 | ALLAVFHSASKIITL | ORF3a_protein@Aruba(NC_045512@Aruba: + : 25393-26220) | 51-65 |
| 2 | 1369-1378 | PRRARSVRYP linker 1-10 | | |
| 2 | 1379-1392 | IHFYSKWYIRVGAK | ORF8_protein@Mozambique(NC_045512@Mozambique: + : 27894-28259) | 39-52 |
| 2 | 1393-1402 | PRRARSVRYP linker 1-10 | | |
| 2 | 1403-1413 | SAPLIELCLDE | ORF8_protein@Russia(NC_045512@Russia: + : 27894-28259) | 54-64 |
| 2 | 1414-1423 | PRRARSVRYP linker 1-10 | | |
| 2 | 1424-1436 | ANFCALILAYCNK | nsp3(NC_045512: + : 2720-8554) | 890-902 |
| 2 | 1437-1446 | PRRARSVRYP linker 1-10 | | |
| 2 | 1447-1478 | MMFVKHKHAFLCLFLLPSFATVAYFNMVYMPA | nsp6@Indonesia(NC_04551@Indonesia: + : 10973-11842) | 57-88 |
| 2 | 1479-1488 | PRRARSVRYP linker 1-10 | | |
| 2 | 1489-1498 | ISEHDYQIGG | ORF3a_protein@FrenchGuiana(NC_045512@FrenchGuiana: + : 25393-26220) | 179-188 |
| 2 | 1499-1508 | PRRARSVRYP linker 1-10 | | |
| 2 | 1509-1516 | SDDAVVCF | RNA-dependent_RNA_polymerase@Aruba(NC_045512@Aruba: + : | 759-766 |
| | | | 13442-13468 + 13468-16236) | |
| 2 | 1517-1526 | PRRARSVRYP linker 1-10 | | |
| 2 | 1527-1544 | CANFNVLFSTVFPPTSFG | RNA-dependent_RNA_polymerase@China(NC_045512@China: + : | 310-327 |
| | | | 13442-13468 + 13468-16236) | |
| 2 | 1545-1554 | PRRARSVRYP linker 1-10 | | |
| 2 | 1555-1583 | SMWALIISVTSNYSGVVTIVMFLARGIVF | nsp6@SmallSouthAmerica(NC_04551@SmallSouthAmerica: + : 10973-11842) | 160-188 |
| 2 | 1584-1593 | PRRARSVRYP linker 1-10 | | |
| 2 | 1594-1610 | YADVFHLYLQYIRKLHD | RNA-dependent_RNA_polymerase(NC_045512: + : 13442-13468 + 13468-16236) | 877-893 |
| 2 | 1611-1620 | PRRARSVRYP linker 1-10 | | |
| 2 | 1621-1628 | FNSVCRLM | helicase@Aruba(NC-045512@Aruba: + : 16237-18039) | 422-429 |
| 2 | 1629-1638 | PRRARSVRYP linker 1-10 | | |
| 2 | 1639-1647 | SEAFLIGCN | 2′-O-ribose_methyltransferase(NC_045512: + : 20659-21552) | 202-210 |
| 2 | 1648-1657 | PRRARSVRYP linker 1-10 | | |
| 2 | 1658-1671 | KHWPQIAQFAPSAS | nucleocapsid_phosphoprotein@Australia(NC_045512@Australia: + : | 299-312 |
| | | | 28274-29533) | |
| 2 | 1672-1681 | PRRARSVRYP linker 1-10 | | |
| 2 | 1682-1698 | INFVRIIMRLWLCCKCR | ORF3a_protein@Australia(NC_045512@Australia: + : 25393-26220) | 118-134 |
| 2 | 1699-1708 | PRRARSVRYP linker 1-10 | | |
| 2 | 1709-1724 | EEIIYNLLKDCPAVAK | RNA-dependent_RNA_polymerase@Senegal(NC_045512@Senegal: + : | 83-98 |
| | | | 13442-13468 + 13468-16236) | |
| 2 | 1725-1734 | PRRARSVRYP linker 1-10 | | |
| 2 | 1735-1750 | SRIIPARAVDCFDKF | helicase@Brazil(NC-045512@Brazil: + : 16237-18039) | 331-346 |
| 2 | 1751-1760 | PRRARSVRYP linker 1-10 | | |
| 2 | 1761-1771 | EQYVFCTVNAL | helicase(NC-045512: + : 16237-18039) | 353-363 |
| 2 | 1772-1781 | PRRARSVRYP linker 1-10 | | |
| 2 | 1782-1793 | EVFAQVKQIYKT | surface_glycoprotein@Aruba(NC_045512@Aruba: + : 21563-25384) | 776-787 |
| 2 | 1794-1803 | PRRARSVRYP linker 1-10 | | |
| 2 | 1804-1812 | ASQGLVASI | RNA-dependent_RNA_polymerase@Aruba(NC_045512@Aruba: + : | 771-779 |
| | | | 13442-13468 + 13468-16236) | |
| 2 | 1813-1822 | PRRARSVRYP linker 1-10 | | |
| 2 | 1823-1838 | QLALSKGFHFVCNLLL | ORF3a_protein@Iceland(NC_045512@Iceland: + : 25393-26220) | 70-85 |
| 2 | 1839-1848 | PRRARSVRYP linker 1-10 | | |
| 2 | 1849-1871 | TTVMFLARGIVFMCVEYCPIFFI | nsp6@Aruba(NC_04551@Aruba: + : 10973-11842) | 177-199 |
| 2 | 1872-1881 | PRRARSVRYP linker 1-10 | | |
| 2 | 1882-1895 | EGVVDYGARFYFYT | nsp3(NC_045512: + : 2720-8554) | 595-608 |
| 2 | 1896-1905 | PRRARSVRYP linker 1-10 | | |
| 2 | 1906-1913 | TQALPHRQ | nucleocapsid_phosphoprotein@Mozambique(NC_045512@Mozambique: + : | 379-386 |
| | | | 28274-29533) | |
| 2 | 1914-1923 | PRRARSVRYP linker 1-10 | | |
| 2 | 1924-1946 | VAAGLEAPFFYLYALVYFLQSIN | ORF3a_protein@Ecuador(NC_045512@Ecuador: + : 25393-26220) | 97-119 |
| 2 | 1947-1956 | PRRARSVRYP linker 1-10 | | |
| 2 | 1957-1979 | LIAIVMVTIMLCCITSCCSCLKG | surface_glycoprotein@Mozambique(NC_045512@Mozambique: + : 21563-25384) | 1220-1242 |
| 2 | 1980-1989 | PRRARSVRYP linker 1-10 | | |
| 2 | 1990-1997 | AWLYAAVI | 3C-like_proteinase(NC_045512: + : 10055-10972) | 206-213 |
| 2 | 1998-2007 | PRRARSVRYP linker 1-10 | | |
| 2 | 2008-2016 | AGFSLWVYK | 3′-to-5′_exonuclease(NC_045512: + : 18040-19620) | 504-512 |
| 2 | 2017-2026 | PRRARSVRYP linker 1-10 | | |
| 2 | 2027-2045 | ECAQVLSETVMCGGSLYVK | RNA-dependent_RNA_polymerase@Aruba(NC_045512@Aruba: + : | 658-676 |
| | | | 13442-13468 + 13468-16236) | |
| 2 | 2046-2055 | PRRARSVRYP linker 1-10 | | |
| 2 | 2056-2071 | GSNVFQTRAGCLIGAE | surface_glycoprotein(NC_045512: + : 21563-25384) | 639-654 |
| 2 | 2072-2081 | PRRARSVRYP linker 1-10 | | |
| 2 | 2082-2099 | VTTVIFLARGIVFMCVEY | nsp6@Malaysia(NC_04551@Malaysia: + : 10973-11842) | 179-196 |
| 2 | 2100-2109 | PRRARSVRYP linker 1-10 | | |
| 2 | 2110-2134 | VLVQSTQWSLFFFLYENAFLPFAMG | nsp6@Aruba(NC_04551@Aruba: + : 10973-11842) | 24-48 |
| 2 | 2135-2144 | PRRARSVRYP linker 1-10 | | |
| 2 | 2145-2154 | NYQCGHYKHI | nsp3(NC_045512: + : 2720-8554) | 1012-1021 |
| 2 | 2155-2164 | PRRARSVRYP linker 1-10 | | |
| 2 | 2165-2177 | WNVVRIKIVQMLS | 3′-to-5′_exonuclease(NC_045512: + : 18040-19620) | 159-171 |
| 2 | 2178-2187 | PRRARSVRYP linker 1-10 | | |
| 2 | 2188-2196 | TEIYQAGST | surface_glycoprotein@Aruba(NC_045512@Aruba: + : 21563-25384) | 466-474 |
| 2 | 2197-2206 | PRRARSVRYP linker 1-10 | | |
| 2 | 2207-2226 | PINLVRGLPQGFSVLEPLVD | surface_glycoprotein@SmallAfrica(NC_045512@SmallAfrica: + : 21563-25384) | 209-228 |
| 2 | 2227-2236 | PRRARSVRYP linker 1-10 | | |
| 2 | 2237-2253 | SAAYYVGYLQLRTFLLK | surface_glycoprotein@Italy(NC_045512@Italy: + : 21563-25384) | 258-274 |
| 2 | 2254-2263 | PRRARSVRYP linker 1-10 | | |
| 2 | 2264-2272 | FEHIVYGDF | endoRNAse(NC_045512: + : 19621-20658) | 232-240 |
| 2 | 2273-2282 | PRRARSVRYP linker 1-10 | | |
| 2 | 2283-2296 | ETKCTLKSFTVEKG | surface_glycoprotein@Aruba(NC_045512@Aruba: + : 21563-25384) | 294-307 |
| 2 | 2297-2306 | PRRARSVRYP linker 1-10 | | |
| 2 | 2307-2315 | KHWPQIAQF | nucleocapsid_phosphoprotein(NC_045512: + : 28274-29533) | 299-307 |
| 2 | 2316-2325 | PRRARSVRYP linker 1-10 | | |
| 2 | 2326-2335 | KCAYWVPRAS | nsp2(NC_045512: + : 806-2719) | 239-248 |
| 2 | 2336-2345 | PRRARSVRYP linker 1-10 | | |
| 2 | 2346-2360 | AYYVGYLQPRTFLLK | surface_glycoprotein@Aruba(NC_045512@Aruba: + : 21563-25384) | 260-274 |
| 2 | 2361-2370 | PRRARSVRYP linker 1-10 | | |
| 2 | 2371-2388 | IKVCEFQFCNDPFLGVHY | surface_glycoprotein@Aruba(NC_045512@Aruba: + : 21563-25384) | 125-142 |
| 2 | 2389-2398 | PRRARSVRYP linker 1-10 | | |
| 2 | 2399-2410 | TRAKVGILCITS | helicase@SouthKorea(NC-045512@SouthKorea: + : 16237-18039) | 566-577 |
| 2 | 2411-2420 | PRRARSVRYP linker 1-10 | | |
| 2 | 2421-2434 | SYLFQHANLDSCKR | nsp3(NC_045512: + : 2720-8554) | 915-928 |
| 2 | 2435-2444 | PRRARSVRYP linker 1-10 | | |
| 2 | 2445-2464 | MTSCCSCLKGCCSCGSCCKF | surface_glycoprotein(NC_045512: + : 21563-25384) | 1237-1256 |
| 2 | 2465-2474 | PRRARSVRYP linker 1-10 | | |
| 2 | 2475-2488 | LVLLPLVSSQCVNF | surface_glycoprotein@Brazil(NC_045512@Brazil: + : 21563-25384) | 5-18 |
| 2 | 2489-2498 | PRRARSVRYP linker 1-10 | | |
| 2 | 2499-2506 | CLNRVCTN | nsp3(NC_045512: + : 2720-8554) | 1342-1349 |
| 2 | 2507-2516 | PRRARSVRYP linker 1-10 | | |
| 2 | 2517-2537 | AVLYQGVNCTEVPFAIHADQL | surface_glycoprotein@SmallAfrica(NC_045512@SmallAfrica: + : | 506-625 |
| | | | 21563-25384) | |
| 3 | 1-17 | LECNVKTTEVVGDIILK | nsp3(NC_045512: + : 2720-8554) | 1244-1260 |
| 3 | 18-27 | PRRARSVRYP linker 1-10 | | |
| 3 | 28-44 | EVTPSGTWLTYTGAIKL | nucleocapsid_phosphoprotein@Bulgaria(NC_045512@Bulgaria: + : | 323-339 |
| | | | 28274-29533) | |
| 3 | 45-54 | PRRARSVRYP linker 1-10 | | |
| 3 | 55-68 | LKEILVTYNCCDDD | RNA-dependent_RNA_polymerase(NC_045512: + : 13442-13468 + 13468-16236) | 142-155 |
| 3 | 69-78 | PRRARSVRYP linker 1-10 | | |
| 3 | 79-100 | INLVRDLPQGFSALEPLVDLPI | surface_glycoprotein@Aruba(NC_045512@Aruba: + : 21563-25384) | 206-227 |
| 3 | 101-110 | PRRARSVRYP linker 1-10 | | |
| 3 | 111-120 | ETFVTHSKGL | nsp2(NC_045512: + : 806-2719) | 527-536 |
| 3 | 121-130 | PRRARSVRYP linker 1-10 | | |
| 3 | 131-141 | YDNLQFISLEI | helicase@Austria(NC-045512@Austria: + : 16237-18039) | 582-592 |
| 3 | 142-151 | PRRARSVRYP linker 1-10 | | |
| 3 | 152-178 | AKYTQLCQYLNTLTLAVPYNMRVIHFG | 2′-O-ribose_methyltransferase(NC_045512: + : 20659-21552) | 45-71 |
| 3 | 179-188 | PRRARSVRYP linker 1-10 | | |
| 3 | 189-203 | VNCTEVPVAIHADQL | surface_glycoprotein(NC_045512: + : 21563-25384) | 615-629 |
| 3 | 204-213 | PRRARSVRYP linker 1-10 | | |
| 3 | 214-221 | ISEHDYQI | ORF3a_protein@Aruba(NC_045512@Aruba: + : 25393-26220) | 179-186 |
| 3 | 222-231 | PRRARSVRYP linker 1-10 | | |
| 3 | 232-245 | TSGVGYQPYRVVVL | surface_glycoprotein@Aruba(NC_045512@Aruba: + : 21563-25384) | 496-509 |
| 3 | 246-255 | PRRARSVRYP linker 1-10 | | |
| 3 | 256-266 | ITNCVKMLCTH | nsp10(NC_045512: + : 13025-13441) | 38-48 |
| 3 | 267-276 | PRRARSVRYP linker 1-10 | | |
| 3 | 277-284 | VVNPVMEP | ORF3a_protein(NC_045512: + : 25393-26220) | 255-262 |
| 3 | 285-294 | PRRARSVRYP linker 1-10 | | |
| 3 | 295-314 | JYQECVRGTTVLLKEPCSSG | ORF7a_protein(NC_045512: + : 27394-27759) | 19-38 |
| 3 | 315-324 | PRRARSVRYP linker 1-10 | | |
| 3 | 325-339 | SYELQTPFEIKLAKK | nsp2(NC_045512: + : 806-2719) | 68-82 |
| 3 | 340-349 | PRRARSVRYP linker 1-10 | | |
| 3 | 350-357 | SSIVITSG | ORF3a_protein@SouthKorea(NC_045512@SouthKorea: + : 25393-26220) | 165-172 |
| 3 | 358-367 | PRRARSVRYP linker 1-10 | | |
| 3 | 368-377 | KACVEEVTTT | nsp3(NC_045512: + : 2720-8554) | 415-424 |
| 3 | 378-387 | PRRARSVRYP linker 1-10 | | |
| 3 | 388-405 | DKACPLIAAVITREVGFV | nsp4(NC_045512: + : 8555-10054) | 85-102 |
| 3 | 406-415 | PRRARSVRYP linker 1-10 | | |
| 3 | 416-426 | YCPRHVICTSE | 3C-like_proteinase(NC_045512: + : 10055-10972) | 37-47 |
| 3 | 427-436 | PRRARSVRYP linker 1-10 | | |
| 3 | 437-452 | ANSIVCRFDTRVLSNL | 3′-to-5′_exonuclease(NC_045512: + : 18040-19620) | 394-409 |
| 3 | 453-462 | PRRARSVRYP linker 1-10 | | |
| 3 | 463-470 | SSIVITSV | ORF3a_protein@Aruba(NC_045512@Aruba: + : 25393-26220) | 165-172 |
| 3 | 471-480 | PRRARSVRYP linker 1-10 | | |
| 3 | 481-509 | FLYIIKLIFLWLLWPVTLACFVLAAVYRI | membrane_glycoprotein@Aruba(NC_045512@Aruba: + : 26523-27191) | 45-73 |
| 3 | 510-519 | PRRARSVRYP linker 1-10 | | |
| 3 | 520-527 | MADLVYAL | RNA-dependent_RNA_polymerase(NC_045512: + : 13442-13468 + 13468-16236) | 124-131 |
| 3 | 528-537 | PRRARSVRYP linker 1-10 | | |
| 3 | 538-545 | KLGASQRV | membrane_glycoprotein(NC_045512: + : 26523-27191) | 180-187 |
| 3 | 546-555 | PRRARSVRYP linker 1-10 | | |
| 3 | 556-567 | FRSSVLHSTRDL | surface_glycoprotein@Nigeria(NC_045512@Nigeria: + : 21563-25384) | 43-54 |
| 3 | 568-577 | PRRARSVRYP linker 1-10 | | |
| 3 | 578-588 | FFSNVTWFHVS | surface_glycoprotein@Nigeria(NC_045512@Nigeria: + : 21563-25384) | 58-68 |
| 3 | 589-598 | PRRARSVRYP linker 1-10 | | |
| 3 | 599-611 | AFASEAARVVRSI | nsp2(NC_045512: + : 806-2719) | 355-367 |
| 3 | 612-621 | PRRARSVRYP linker 1-10 | | |
| 3 | 622-633 | SSPDAVTAYNGY | nsp3(NC_045512: + : 2720-8554) | 660-671 |
| 3 | 634-643 | PRRARSVRYP linker 1-10 | | |
| 3 | 644-656 | KASCTLSEQLDFI | nsp2(NC_045512: + : 806-2719) | 30-42 |
| 3 | 657-666 | PRRARSVRYP linker 1-10 | | |
| 3 | 667-676 | GNCDVVIGIV | surface_glycoprotein(NC_045512: + : 21563-25384) | 1124-1133 |
| 3 | 677-686 | PRRARSVRYP linker 1-10 | | |
| 3 | 687-699 | YTELEPPCRFVTD | nsp9(NC_045512: + : 12686-13024) | 66-78 |
| 3 | 700-709 | PRRARSVRYP linker 1-10 | | |
| 3 | 710-717 | AEVQIDRL | surface_glycoprotein(NC_045512: + : 21563-25384) | 989-996 |
| 3 | 718-727 | PRRARSVRYP linker 1-10 | | |
| 3 | 728-741 | RLNVGDYFVLTSHT | helicase@Austria(NC-045512@Austria: + : 16237-18039) | 218-231 |
| 3 | 442-751 | PRRARSVRYP linker 1-10 | | |
| 3 | 752-778 | FSASTSAFVETVKGLDYKAFKQIVESC | nsp2(NC_045512: + : 806-2719) | 300-326 |
| 3 | 779-788 | PRRARSVRYP linker 1-10 | | |
| 3 | 789-806 | QLALFKGVHFVCNLLLLF | ORF3a_protein@CostaRica(NC_045512@CostaRica: + : 25393-26220) | 70-87 |
| 3 | 807-816 | PRRARSVRYP linker 1-10 | | |
| 3 | 817-839 | KEITVATSRTLSYYKLGASQRVA | membrane_glycoprotein@Aruba(NC_045512@Aruba: + : 26523-27191) | 166-188 |
| 3 | 840-849 | PRRARSVRYP linker 1-10 | | |
| 3 | 850-857 | SQDLSVVS | endoRNAse(NC_045512: + : 19621-20658) | 308-315 |
| 3 | 858-867 | PRRARSVRYP linker 1-10 | | |
| 3 | 868-877 | EGSVRVVTTF | nsp4(NC_045512: + : 8555-10054) | 207-216 |
| 3 | 878-887 | PRRARSVRYP linker 1-10 | | |
| 3 | 888-904 | PNFVFPLNSIIKTIQPR | nsp2(NC_045512: + : 806-2719) | 91-107 |
| 3 | 905-914 | PRRARSVRYP linker 1-10 | | |
| 3 | 915-930 | AFKLNIKLLGVGGKPC | nsp6(NC_045512: + : 10973-11842) | 268-283 |
| 3 | 931-940 | PRRARSVRYP linker 1-10 | | |
| 3 | 941-950 | TLPVNVAFEL | endoRNAse(NC_045512: + : 19621-20658) | 48-57 |
| 3 | 951-960 | PRRARSVRYP linker 1-10 | | |
| 3 | 961-968 | TQALLQRQ | nucleocapsid_phosphoprotein@CostaRica(NC_045512@CostaRica: + : | 379-386 |
| | | | 28274-29533) | |
| 3 | 969-978 | PRRARSVRYP linker 1-10 | | |
| 3 | 979-989 | SPGVFNPVMEP | ORF3a_protein@Colombia(NC_045512@Colombia: + : 25393-26220) | 252-262 |
| 3 | 990-999 | PRRARSVRYP linker 1-10 | | |
| 3 | 1000-1014 | VCNLLLLFVTVYSHL | ORF3a_protein@Croatia(NC_045512@Croatia: + : 25393-26220) | 80-94 |
| 3 | 1015-1024 | PRRARSVRYP linker 1-10 | | |
| 3 | 1025-1049 | AAGLEAPFLYLYVLVYFLQSINFVR | ORF3a_protein@Norway(NC_045512@Norway: + : 25393-26220) | 98-122 |
| 3 | 1050-1059 | PRRARSVRYP linker 1-10 | | |
| 3 | 1060-1067 | APLEILCV | ORF8_protein(NC_045512: + : 27894-28259) | 55-62 |
| 3 | 1068-1077 | PRRARSVRYP linker 1-10 | | |
| 3 | 1078-1098 | HPNCVNCSDDRCILHCANFNV | RNA-dependent_RNA_polymerase@Aruba(NC_045512@Aruba: + : | 295-315 |
| | | | 13442-13468 + 13468-16236) | |
| 3 | 1099-1108 | PRRARSVRYP linker 1-10 | | |
| 3 | 1109-1123 | FKELLVYAADPAMHA | RNA-dependent_RNA_polymerase(NC_045512: + : 13442-13468 + 13468-16236) | 368-382 |
| 3 | 1124-1133 | PRRARSVRYP linker 1-10 | | |
| 3 | 1134-1153 | KLTCATTRQVVNVVTTKIAL | nsp3(NC_045512: + : 2720-8554) | 1923-1942 |
| 3 | 1154-1163 | PRRARSVRYP linker 1-10 | | |
| 3 | 1164-1175 | FRSSVLHSTQDL | surface_glycoprotein@Aruba(NC_045512@Aruba: + : 21563-25384) | 43-54 |
| 3 | 1176-1185 | PRRARSVRYP linker 1-10 | | |
| 3 | 1186-1199 | SVASQSIIAYTMSL | surface_glycoprotein@Aruba(NC_045512@Aruba: + : 21563-25384) | 678-691 |
| 3 | 1200-1209 | PRRARSVRYP linker 1-10 | | |
| 3 | 1210-1225 | LVDFQVTIAEILLIIM | ORF6_protein(NC_045512: + : 27202-27387) | 4-19 |
| 3 | 1226-1235 | PRRARSVRYP linker 1-10 | | |
| 3 | 1236-1244 | YDLSVVNAR | helicase(NC_045512: + : 16237-18039) | 382-390 |
| 3 | 1245-1254 | PRRARSVRYP linker 1-10 | | |
| 3 | 1255-1274 | FCKLHNWNCVNCDTFCAGST | nsp3(NC_045512: + : 2720-8554) | 1626-1645 |
| 3 | 1275-1284 | PRRARSVRYP linker 1-10 | | |
| 3 | 1285-1294 | GVGGKPCIKV | nsp6@Aruba(NC_045512@Aruba: + : 10973-11842) | 274-283 |
| 3 | 1295-1304 | PRRARSVRYP linker 1-10 | | |
| 3 | 1305-1325 | ELVIGAVILRGHLRIAGHHLG | membrane_glycoprotein@Aruba(NC_045512@Aruba: + : 26523-27191) | 137-157 |
| 3 | 1326-1335 | PRRARSVRYP linker 1-10 | | |
| 3 | 1336-1345 | TPLIQPIGAL | nsp4(NC_045512: + : 8555-10054) | 269-278 |
| 3 | 1346-1355 | PRRARSVRYP linker 1-10 | | |
| 3 | 1356-1369 | TCFSVAATNNVAF | RNA-dependent_RNA_polymerase@Aruba(NC_045512@Aruba: + : | 394-407 |
| | | | 13442-13468 + 13468-16236) | |
| 3 | 1370-1379 | PRRARSVRYP linker 1-10 | | |
| 3 | 1380-1402 | TIATYCTGSIPCSVCLSGLDSLD | nsp3(NC_045512: + : 2720-8554) | 1459-1481 |
| 3 | 1403-1412 | PRRARSVRYP linker 1-10 | | |
| 3 | 1413-1430 | CANFNVLFSTVFPFTSFG | RNA-dependent_RNA_polymerase@Nigeria(NC_045512@Nigeria: + : | 310-327 |
| | | | 13442-13468 + 13468-16236) | |
| 3 | 1431-1440 | PRRARSVRYP linker 1-10 | | |
| 3 | 1441-1454 | TKDVVECLKLSHQS | nsp3(NC_045512: + : 2720-8554) | 1830-1843 |
| 3 | 1455-1464 | PRRARSVRYP linker 1-10 | | |
| 3 | 1465-1482 | IKDLPKEITVATSRTLSY | membrane_glycoprotein(NC_045512: + : 26523-27191) | 161-178 |
| 3 | 1483-1492 | PRRARSVRYP linker 1-10 | | |
| 3 | 1493-1524 | IMASLVLARKHTTCCSLSHRFYRLANECAQVL | RNA-dependent_RNA_polymerase(NC_045512: + : 13442-13468 + 13468-16236) | 632-663 |
| 3 | 1525-1534 | PRRARSVRYP linker 1-10 | | |
| 3 | 1535-1549 | SYFAIGLALYYPSAR | helicase@Austria(NC-045512@Austria: + : 16237-18039) | 289-303 |
| 3 | 1550-1559 | PRRARSVRYP linker 1-10 | | |
| 3 | 1560-1569 | KSASVYYSQL | nsp3(NC_045512: + : 2720-8554) | 1737-1746 |
| 3 | 1570-1579 | PRRARSVRYP linker 1-10 | | |
| 3 | 1580-1591 | DTSLKLKECVMY | nsp6@SmallAsia(NC_045512@SmallAsia: + : 10973-11842) | 102-113 |
| 3 | 1592-1601 | PRRARSVRYP linker 1-10 | | |
| 3 | 1602-1617 | FRELGVVHNQDVNLHS | RNA-dependent_RNA_polymerase(NC_045512: + : 13442-13468 + 13468-16236) | 348-363 |
| 3 | 1618-1627 | PRRARSVRYP linker 1-10 | | |
| 3 | 1628-1664 | VAAGLEAPFLYLYALVYFLQSINFVRIIMRLW | ORF3a_protein@Aruba(NC_045512@Aruba: + : 25393-26220) | 97-133 |
| | | LCWKC | | |
| 3 | 1665-1674 | PRRARSVRYP linker 1-10 | | |
| 3 | 1675-1683 | VTANVNALL | RNA-dependent_RNA_polymerase(NC_045512: + : 13442-13468 + 13468-16236) | 700-708 |
| 3 | 1684-1693 | PRRARSVRYP linker 1-10 | | |
| 3 | 1694-1713 | SEAVEAPLVGTPVCINGLML | nsp2(NC_045512: + : 806-2719) | 591-610 |
| 3 | 1714-1723 | PRRARSVRYP linker 1-10 | | |
| 3 | 1724-1738 | INAACRKVQHMVVKA | 3′-to-5′_exonuclease(NC_045512: + : 18040-19620) | 305-319 |
| 3 | 1739-1748 | PRRARSVRYP linker 1-10 | | |
| 3 | 1749-1759 | ETTVDIVVFDE | helicase@SmallAsia(NC-045512@SmallAsia: + : 16237-18039) | 365-375 |
| 3 | 1760-1769 | PRRARSVRYP linker 1-10 | | |
| 3 | 1770-1793 | TYASALWEIQQVVDADSKIVQLSE | nsp8(NC_045512: + : 12092-12685) | 148-171 |
| 3 | 1794-1803 | PRRARSVRYP linker 1-10 | | |
| 3 | 1804-1823 | RAKHYVYIGDPAQLPAPRTL | helicase(NC_045512: + : 16237-18039) | 392-411 |
| 3 | 1824-1833 | PRRARSVRYP linker 1-10 | | |
| 3 | 1834-1847 | DGCVPLNIIPLTTA | nsp8(NC_045512: + : 12092-12685) | 112-125 |
| 3 | 1848-1857 | PRRARSVRYP linker 1-10 | | |
| 3 | 1858-1866 | KLMVVIPDY | nsp8(NC_045512: + : 12092-12685) | 127-135 |
| 3 | 1867-1876 | PRRARSVRYP linker 1-10 | | |
| 3 | 1877-1884 | PSFLGRYM | nsp3(NC_045512: + : 2720-8554) | 822-829 |
| 3 | 1885-1894 | PRRARSVRYP linker 1-10 | | |
| 3 | 1895-1908 | FGTVYEKLKPVLDW | nsp2(NC_045512: + : 806-2719) | 437-450 |
| 3 | 1909-1918 | PRRARSVRYP linker 1-10 | | |
| 3 | 1919-1929 | AALALLLLDRL | nucleocapsid_phosphoprotein@Aruba(NC_045512@Aruba: + : 28274-29533) | 217-227 |
| 3 | 1930-1939 | PRRARSVRYP linker 1-10 | | |
| 3 | 1940-1947 | EIYQAGSK | surface_glycoprotein@Mexico(NC_045512@Mexico: + : 21563-25384) | 471-478 |
| 3 | 1948-1957 | PRRARSVRYP linker 1-10 | | |
| 3 | 1958-1966 | DYYQLYSTQ | ORF3a_protein(NC_045512: + : 25393-26220) | 210-218 |
| 3 | 1967-1976 | PRRARSVRYP linker 1-10 | | |
| 3 | 1977-1992 | LQSLQTYVTQQLIRAA | surface_glycoprotein(NC_045512: + : 21563-25384) | 1001-1016 |
| 3 | 1993-2002 | PRRARSVRYP linker 1-10 | | |
| 3 | 2003-2015 | NFRVQPTESIVRF | surface_glycoprotein(NC_045512: + : 21563-25384) | 317-329 |
| 3 | 2016-2025 | PRRARSVRYP linker 1-10 | | |
| 3 | 2026-2036 | GEVPVSIINNT | endoRNAse(NC_045512: + : 19621-20658) | 20-30 |
| 3 | 2037-2046 | PRRARSVRYP linker 1-10 | | |
| 3 | 2047-2069 | YALVYFLQSINFVIIIMRLWLCW | ORF3a_protein@Denmark(NC_045512@Denmark: + : 25393-26220) | 109-131 |
| 3 | 2070-2079 | PRRARSVRYP linker 1-10 | | |
| 3 | 2080-2091 | LKKLKKSLNVAK | nsp8(NC_045512: + : 12092-12685) | 35-46 |
| 3 | 2092-2101 | PRRARSVRYP linker 1-10 | | |
| 3 | 2102-2109 | FTGCVIAW | surface_glycoprotein(NC_045512: + : 21563-25384) | 429-436 |
| 3 | 2110-2119 | PRRARSVRYP linker 1-10 | | |
| 3 | 2121-2130 | SELVIGAVILR | membrane_glycoprotein(NC_045512: + : 26523-27191) | 136-146 |
| 3 | 2131-2140 | PRRARSVRYP linker 1-10 | | |
| 3 | 2141-2160 | PINLVRGLPQGFSALEPLVD | surface_glycoprotein@Austria(NC_045512@Austria: + : 21563-25384) | 205-224 |
| 3 | 2161-2170 | PRRARSVRYP linker 1-10 | | |
| 3 | 2171-2182 | HEFCSQHTMLVK | RNA-dependent_RNA_polymerase(NC_045512: + : 13442-13468 + 13468-16236) | 810-821 |
| 3 | 2183-2192 | PRRARSVRYP linker 1-10 | | |
| 3 | 2193-2203 | RFQLHRSYLTP | surface_glycoprotein@Austria(NC_045512@Austria: + : 21563-25384) | 233-243 |
| 3 | 2204-2213 | PRRARSVRYP linker 1-10 | | |
| 3 | 2214-2227 | RNLQHRLYECLYRN | RNA-dependent_RNA_polymerase(NC_045512: + : 13442-13468 + 13468-16236) | 721-734 |
| 3 | 2228-2237 | PRRARSVRYP linker 1-10 | | |
| 3 | 2238-2245 | FNSVCRFM | helicase@Malaysia(NC_045512@Malaysia: + : 16237-18039) | 422-429 |
| 3 | 2246-2255 | PRRARSVRYP linker 1-10 | | |
| 3 | 2256-2270 | IPIRASLPFWGLIVG | ORF3a_protein@Iceland(NC_045512@Iceland: + : 25393-26220) | 35-49 |
| 3 | 2271-2280 | PRRARSVRYP linker 1-10 | | |
| 3 | 2281-2295 | ALLAVFQSASKIITL | ORF3a_protein@Bangladesh(NC_045512@Bangladesh: + : 25393-26220) | 51-65 |
| 3 | 2296-2305 | PRRARSVRYP linker 1-10 | | |
| 3 | 2306-2315 | FEYVSQPFLM | surface_glycoprotein@Aruba(NC_045512@Aruba: + : 21563-25384) | 164-173 |
| 3 | 2316-2325 | PRRARSVRYP linker 1-10 | | |
| 3 | 2326-2335 | KQYGDCLGNI | surface_glycoprotein@Jordan(NC_045512@Jordan: + : 21563-25384) | 831-840 |
| 3 | 2336-2345 | PRRARSVRYP linker 1-10 | | |
| 3 | 2346-2360 | VDTSLSSLKLKDCVM | nsp6@Latvia(NC_045512@Latvia: + : 10973-11842) | 101-115 |
| 3 | 2361-2370 | PRRARSVRYP linker 1-10 | | |
| 3 | 2371-2379 | YGIIWVATE | nucleocapsid_phosphoprotein@SmallSouthAmerica(NC_045512@ | 128-136 |
| | | | SmallSouthAmterica: + : 28274-29533) | |
| 3 | 2380-2389 | PRRARSVRYP linker 1-10 | | |
| 3 | 2390-2408 | ANSVFNICQSVTANVNALL | RNA-dependent_RNA_polymerase@Croatia(NC_045512@Croatia: + : | 690-708 |
| | | | 13442-13468 + 13468-16236) | |
| 3 | 2409-2418 | PRRARSVRYP linker 1-10 | | |
| 3 | 2419-2428 | QEHYVRITGL | helicase(NC_045512: + : 16237-18039) | 243-252 |
| 3 | 2429-2438 | PRRARSVRYP linker 1-10 | | |
| 3 | 2439-2446 | YDPLQPEL | surface_glycoprotein(NC_045512: + : 21563-25384) | 1138-1145 |
| 3 | 2447-2456 | PRRARSVRYP linker 1-10 | | |
| 3 | 2457-2465 | EVFAQVKQI | surface_glycoprotein(NC_045512: + : 21563-25384) | 780-788 |
| 3 | 2466-2475 | PRRARSVRYP linker 1-10 | | |
| 3 | 2476-2491 | FLVLLPLVSIQCVNLT | surface_glycoprotein@SmallNorthAmerica(NC_045512@SmallNorthAmerica: + : | 4-19 |
| | | | 21563-25384) | |
| 3 | 2492-2501 | PRRARSVRYP linker 1-10 | | |
| 3 | 2502-2511 | KQYGDCLGDI | surface_glycoprotein(NC_045512: + : 21563-25384) | 835-844 |
| 3 | 2512-2521 | PRRARSVRYP linker 1-10 | | |
| 3 | 2522-2536 | YNLLKGCPAVAKHDF | RNA-dependent_RNA_polymerase@Poland(NC_045512@Poland: + : | 87-101 |
| | | | 13442-13468 + 13468-16236) | |
| 4 | 1-14 | ANPVLPFNDGVYFA | surface_glycoprotein@Austria(NC_045512@Austria: + : 21563-25384) | 77-90 |
| 4 | 15-24 | PRRARSVRYP linker 1-10 | | |
| 4 | 25-35 | GKPVPYCYDTN | nsp4(NC_045512: + : 8555-10054) | 164-174 |
| 4 | 36-45 | PRRARSVRYP linker 1-10 | | |
| 4 | 46-57 | VTMPLGYVTHGL | nsp3(NC_045512: + : 2720-8554) | 628-639 |
| 4 | 58-67 | PRRARSVRYP linker 1-10 | | |
| 4 | 68-79 | FNCYFPLQSYGF | surface_glycoprotein(NC_045512: + : 21563-25384) | 486-497 |
| 4 | 80-89 | PRRARSVRYP linker 1-10 | | |
| 4 | 90-113 | PINLVRDLPQGFSVLEPLVDLPIG | surface_glycoprotein@Belgium(NC_045512@Belgium: + : 21563-25384) | 205-228 |
| 4 | 114-123 | PRRARSVRYP linker 1-10 | | |
| 4 | 124-144 | QWNLVIGFLFLTWICLLQFAY | membrane_glycoprotein@Aruba(NC_045512@Aruba: + : 26523-27191) | 19-39 |
| 4 | 145-154 | PRRARSVRYP linker 1-10 | | |
| 4 | 155-176 | SDFVRATATIPIQASLPFGWLI | ORF3a_protein@Aruba(NC_045512@Aruba: + : 25393-26220) | 26-47 |
| 4 | 177-186 | PRRARSVRYP linker 1-10 | | |
| 4 | 187-197 | AVHECFVKRVD | 3′-to-5′_exonuclease(NC_045512: + : 18040-19620) | 281-291 |
| 4 | 198-207 | PRRARSVRYP linker 1-10 | | |
| 4 | 208-215 | ETQALPQR | nucleocapsid_phosphoprotein@SmallNorthAmerica(NC_045512@ | 378-385 |
| | | | SmallNorthAmterica: + : 28274-29533) | |
| 4 | 216-225 | PRRARSVRYP linker 1-10 | | |
| 4 | 226-238 | LLNVPLHGTILTR | membrane_glycoprotein(NC_045512: + : 26523-27191) | 119-131 |
| 4 | 239-248 | PRRARSVRYP linker 1-10 | | |
| 4 | 249-268 | RLCAYCCNIVNVSLVKPSFY | envelope_protein(NC_045512: + : 26245-26472) | 38-57 |
| 4 | 269-278 | PRRARSVRYP linker 1-10 | | |
| 4 | 279-286 | EVTPSGTW | nucleocapsid_phosphoprotein(NC_045512: + : 28274-29533) | 323-330 |
| 4 | 287-296 | PRRARSVRYP linker 1-10 | | |
| 4 | 297-306 | DVVAIDYKHY | nsp3(NC_045512: + : 2720-8554) | 1148-1157 |
| 4 | 307-316 | PRRARSVRYP linker 1-10 | | |
| 4 | 317-325 | SPDVDLADI | surface_glycoprotein@Chile(NC_045512@Chile: + : 21563-25384) | 1161-1169 |
| 4 | 326-335 | PRRARSVRYP linker 1-10 | | |
| 4 | 336-358 | KNPLLYDANYFLCCHTNCYDYCI | ORF3a_protein@Senegal(NC_045512@Senegal: + : 25393-26220) | 136-158 |
| 4 | 359-368 | PRRARSVRYP linker 1-10 | | |
| 4 | 369-380 | NIGCNHTGVVGE | nsp2(NC_045512: + : 806-2719) | 250-261 |
| 4 | 381-390 | PRRARSVRYP linker 1-10 | | |
| 4 | 391-402 | AKLLHKPIVWHV | nsp3(NC_045512: + : 2720-8554) | 1165-1176 |
| 4 | 403-412 | PRRARSVRYP linker 1-10 | | |
| 4 | 413-424 | VRTNVYLAVFDK | nsp3(NC_045512: + : 2720-8554) | 351-362 |
| 4 | 425-434 | PRRARSVRYP linker 1-10 | | |
| 4 | 435-446 | VPVVDSYYSLLM | RNA-dependent_RNA_polymerase(NC_045512: + : 13442-13468 + 13468-16236) | 231-242 |
| 4 | 447-456 | PRRARSVRYP linker 1-10 | | |
| 4 | 457-464 | DQDVLFAY | RNA-dependent_RNA_polymerase@FrenchGuiana(NC_045512@ | 523-530 |
| | | | FrenchGuiana: + :13442-13468 + 13468-16236) | |
| 4 | 465-474 | PRRARSVRYP linker 1-10 | | |
| 4 | 475-487 | ATNVVIKVCEFQF | surface_glycoprotein(NC_045512: + : 21563-25384) | 123-135 |
| 4 | 488-497 | PRRARSVRYP linker 1-10 | | |
| 4 | 498-508 | YDKLQFISLEI | helicase@SouthAfrica(NC_045512@SouthAfrica: + : 16237-18039) | 582-592 |
| 4 | 509-518 | PRRARSVRYP linker 1-10 | | |
| 4 | 519-526 | SVDCTMYI | surface_glycoprotein(NC_045512: + : 21563-25384) | 735-742 |
| 4 | 528-536 | PRRARSVRYP linker 1-10 | | |
| 4 | 537-544 | SDFVRATA | ORF3a_protein(NC_045512: + : 25393-26220) | 26-33 |
| 4 | 545-554 | PRRARSVRYP linker 1-10 | | |
| 4 | 555-563 | ASQGLLASI | RNA-dependent_RNA_polymerase@Austria(NC_045512@Austria: + : | 771-779 |
| | | | 13442-13468 + 13468-16236) | |
| 4 | 564-573 | PRRARSVRYP linker 1-10 | | |
| 4 | 574-583 | PFTINVQEPK | ORF8_protein@India(NC_04551@India: + : 27894-28259) | 85-94 |
| 4 | 584-593 | PRRARSVRYP linker 1-10 | | |
| 4 | 594-601 | FKLASHMY | nsp3(NC_045512: + : 2720-8554) | 96-103 |
| 4 | 602-611 | PRRARSVRYP linker 1-10 | | |
| 4 | 612-625 | LMNVLTLVYKVYYG | nsp6@Aruba(NC_045512@Aruba: + : 10973-11842) | 139-152 |
| 4 | 626-635 | PRRARSVRYP linker 1-10 | | |
| 4 | 636-647 | SVFQSASKIITL | ORF3a_protein@Iceland(NC_045512@Iceland: + : 25393-26220) | 54-65 |
| 4 | 648-657 | PRRARSVRYP linker 1-10 | | |
| 4 | 658-680 | YLGGMSYYCKSHKLPSIFPLCAN | helicase@CostaRica(NC_045512@CostaRica: + : 16237-18039) | 64-86 |
| 4 | 681-690 | PRRARSVRYP linker 1-10 | | |
| 4 | 691-700 | NCYDYCIPYN | RF3a_protein(NC_045512: + : 25393-26220) | 152-161 |
| 4 | 701-710 | PRRARSVRYP linker 1-10 | | |
| 4 | 711-722 | YPSLETIQITIS | nsp3(NC_045512: + : 2720-8554) | 1483-1494 |
| 4 | 723-732 | PRRARSVRYP linker 1-10 | | |
| 4 | 733-783 | HFAIGLALYYPSARIVYTACSHAAVDALCEKY | helicase(NC_045512: + : 16237-18039) | 290-340 |
| | | LPIDKCSRIIPARARV | | |
| 4 | 784-793 | PRRARSVRYP linker 1-10 | | |
| 4 | 794-801 | STFKCYGV | surface_glycoprotein@Aruba(NC_045512@Aruba: + : 21563-25384) | 371-378 |
| 4 | 802-811 | PRRARSVRYP linker 1-10 | | |
| 4 | 812-821 | GLKLKDCVMY | nsp6@Peru(NC_045512@Peru: + : 10973-11842) | 107-116 |
| 4 | 822-831 | PRRARSVRYP linker 1-10 | | |
| 4 | 832-847 | DKYVRNLQHRLYECLY | RNA-dependent_RNA_polymerase@Aruba(NC_045512@Aruba: + : | 717-732 |
| | | | 13442-13468 + 13468-16236) | |
| 4 | 848-857 | PRRARSVRYP linker 1-10 | | |
| 4 | 858-869 | ISVTTEILPVSM | surface_glycoprotein(NC_045512: + : 21563-25384) | 720-731 |
| 4 | 870-879 | PRRARSVRYP linker 1-10 | | |
| 4 | 880-908 | TLQCIMLVYCFLGYGCTCYFGLFCLLNRY | nsp6@Aruba(NC_045512@Aruba: + : 10973-11842) | 203-231 |
| 4 | 909-918 | PRRARSVRYP linker 1-10 | | |
| 4 | 919-933 | QIELKFNPPALQDAY | nsp3(NC_045512: + : 2720-8554) | 867-881 |
| 4 | 934-943 | PRRARSVRYP linker 1-10 | | |
| 4 | 944-951 | DCATVHTA | 2′-O-ribose_methyltransferase(NC_04551: + : 20659-21552) | 114-121 |
| 4 | 952-961 | PRRARSVRYP linker 1-10 | | |
| 4 | 962-981 | IRRPFLCCKCCYDHVISTSH | helicase(NC_045512: + : 16237-18039) | 20-39 |
| 4 | 982-990 | PRRARSVRYP linker 1-10 | | |
| 4 | 992-1001 | LPFTINCQEL | ORF8_protein@Mozambique(NC_04551@Mozambique: + : 27894-28259) | 84-93 |
| 4 | 1002-1011 | PRRARSVRYP linker 1-10 | | |
| 4 | 1012-1031 | DANYFLCWHTNCYHYCIPYN | ORF3a_protein@Indonesia(NC_045512@Indonesia: + : 25393-26220) | 142-161 |
| 4 | 1032-1041 | PRRARSVRYP linker 1-10 | | |
| 4 | 1042-1051 | VVADAVIKTL | nsp3(NC_045512: + : 2720-8554) | 56-65 |
| 4 | 1052-1061 | PRRARSVRYP linker 1-10 | | |
| 4 | 1062-1072 | RQALLKTVQFC | RNA-dependent_RNA_polymerase@Aruba(NC_045512@Aruba: + : | 183-193 |
| | | | 13442-13468 + 13468-16236) | |
| 4 | 1073-1082 | PRRARSVRYP linker 1-10 | | |
| 4 | 1083-1090 | TDVVYRAF | RNA-dependent_RNA_polymerase@Aruba(NC_045512@Aruba: + : | 28-35 |
| | | | 13442-13468 + 13468-16236) | |
| 4 | 1091-1100 | PRRARSVRYP linker 1-10 | | |
| 4 | 1101-1122 | TLGVLPHVGEIPVAYRKVLLR | leader_protein(NC_045512: + : 266-805) | 103-124 |
| 4 | 1123-1132 | PRRARSVRYP linker 1-10 | | |
| 4 | 1133-1142 | VMCGGSLYVK | RNA-dependent_RNA_polymerase(NC_045512: + : 13442-13468 + 13468-16236) | 667-676 |
| 4 | 1143-1152 | PRRARSVRYP linker 1-10 | | |
| 4 | 1153-1165 | FQTLLALHRSYLT | surface_glycoprotein@Aruba(NC_045512@Aruba: + : 21563-25384) | 234-246 |
| 4 | 1166-1175 | PRRARSVRYP linker 1-10 | | |
| 4 | 1176-1183 | VLSEARQH | leader_protein(NC_045512: + : 266-805) | 38-45 |
| 4 | 1184-1193 | PRRARSVRYP linker 1-10 | | |
| 4 | 1194-1216 | GKIQDSLFSTASALGKLQDVVNQ | surface_glycoprotein@NorthMacedonia(NC_045512@NorthMacedonia: + : | 928-950 |
| | | | 21563-25384) | |
| 4 | 1217-1226 | PRRARSVRYP linker 1-10 | | |
| 4 | 1227-1244 | KGFCDLKGKYVQIPTTCA | nsp10(NC_045512: + : 13025-13441) | 87-104 |
| 4 | 1245-1254 | PRRARSVRYP linker 1-10 | | |
| 4 | 1255-1264 | GVITHDVSSA | helicase(NC_045512: + : 16237-18039) | 478-487 |
| 4 | 1265-1274 | PRRARSVRYP linker 1-10 | | |
| 4 | 1275-1284 | NLIIKNLSKS | ORF6_protein(NC_045512: + : 27202-27387) | 34-43 |
| 4 | 1285-1291 | PRRARSVRYP linker 1-10 | | |
| 4 | 1295-1316 | IAMACLVGLMWLSYFIASFRLF | membrane_glycoprotein@Aruba(NC_045512@Aruba: + : 26523-27191) | 82-103 |
| 4 | 1317-1326 | PRRARSVRYP linker 1-10 | | |
| 4 | 1327-1351 | SDIDITFLKKDAPYIVGDVVQEGVL | nsp3(NC_045512: + : 2720-8554) | 454-478 |
| 4 | 1352-1361 | PRRARSVRYP linker 1-10 | | |
| 4 | 1362-1380 | VKDCVVLHSYFTSDYYQLY | ORF3a_protein@Aruba(NC_045512@Aruba: + : 25393-26220) | 197-215 |
| 4 | 1381-1390 | PRRARSVRYP linker 1-10 | | |
| 4 | 1391-1398 | TFSVLACY | 3C-like_proteinase(NC_045512: + : 10055-10972) | 111-118 |
| 4 | 1399-1408 | PRRARSVRYP linker 1-10 | | |
| 4 | 1409-1420 | TRAKVGILCIMS | helicase(NC_045512: + : 16237-18039) | 566-577 |
| 4 | 1421-1430 | PRRARSVRYP linker 1-10 | | |
| 4 | 1431-1448 | SQHTMLVKQGDDYVYLPY | RNA-dependent_RNA_polymerase@Aruba(NC_045512@Aruba: + : | 814-831 |
| | | | 13442-13468 + 13468-16236) | |
| 4 | 1449-1458 | PRRARSVRYP linker 1-10 | | |
| 4 | 1459-1484 | YRLANECAQVLSEMVMCGGSLYVKPG | RNA-dependent_RNA_polymerase@Australia(NC_045512@Australia: + : | 653-678 |
| | | | 13442-13468 + 13468-16236) | |
| 4 | 1485-1494 | PRRARSVRYP linker 1-10 | | |
| 4 | 1495-1508 | IRNLQHRLYECLYR | RNA-dependent_RNA_polymerase@Austria(NC_045512@Austria: + : | 720-733 |
| | | | 13442-13468 + 13468-16236) | |
| 4 | 1509-1518 | PRRARSVRYP linker 1-10 | | |
| 4 | 1519-1534 | TGLHPTQAPTHLSVDT | 3′-to-5′_exonuclease(NC_045512: + : 18040-19620) | 16-31 |
| 4 | 1535-1544 | PRRARSVRYP linker 1-10 | | |
| 4 | 1545-1554 | LAWPLIVTAL | nsp8(NC_045512: + : 12092-12685) | 180-189 |
| 4 | 1555-1564 | PRRARSVRYP linker 1-10 | | |
| 4 | 1565-1581 | LTQYNRYLALYNKYKYF | nsp4(NC_045512: + : 8555-10054) | 438-454 |
| 4 | 1582-1591 | PRRARSVRYP linker 1-10 | | |
| 4 | 1592-1608 | AQSFLNRVCGVSAARLT | RNA-dependent_RNA_polymerase(NC_045512: + : 13442-13468 + 13468-16236) | 4-20 |
| 4 | 1609-1618 | PRRARSVRYP linker 1-10 | | |
| 4 | 1619-1626 | IAANTVIW | endoRNAse(NC_045512: + : 19621-20658) | 79-86 |
| 4 | 1627-1636 | PRRARSVRYP linker 1-10 | | |
| 4 | 1637-1647 | CYTPSLKLIEYT | nsp4(NC_045512: + : 8555-10054) | 133-143 |
| 4 | 1648-1657 | PRRARSVRYP linker 1-10 | | |
| 4 | 1658-1665 | DSYFVVKR | RNA-dependent_RNA_polymerase(NC_045512: + : 13442-13468 + 13468-16236) | 67-74 |
| 4 | 1666-1675 | PRRARSVRYP linker 1-10 | | |
| 4 | 1676-1691 | SEFSSLPSYAAFATAQ | nsp8(NC_045512: + : 12092-12685) | 4-19 |
| 4 | 1692-1701 | PRRARSVRYP linker 1-10 | | |
| 4 | 1702-1715 | ESVVKDCVVLHSYF | ORF3a_protein@CostaRica(NC_045512@CostaRica: + : 25393-26220) | 194-207 |
| 4 | 1716-1725 | PRRARSVRYP linker 1-10 | | |
| 4 | 1726-1747 | GYQPYRVVVLSFELLHAPATVC | surface_glycoprotein(NC_045512: + : 21563-25384) | 504-525 |
| 4 | 1748-1757 | PRRARSVRYP linker 1-10 | | |
| 4 | 1758-1772 | EVPANSTVLSFCAFA | nsp10(NC_045512: + : 13025-13441) | 6-20 |
| 4 | 1773-1782 | PRRARSVRYP linker 1-10 | | |
| 4 | 1783-1798 | TVLKKCKSAFYILPSI | nsp3(NC_045512: + : 2720-8554) | 526-541 |
| 4 | 1799-1808 | PRRARSVRYP linker 1-10 | | |
| 4 | 1809-1825 | INFVRIIMRLWLCLKCR | ORF3a_protein@Mozambique(NC_045512@Mozambique: + : 25393-26220) | 118-134 |
| 4 | 1826-1835 | PRRARSVRYP linker 1-10 | | |
| 4 | 1836-1848 | YAKPFLNKVVSTT | nsp3(NC_045512: + : 2720-8554) | 1323-1335 |
| 4 | 1849-1858 | PRRARSVRYP linker 1-10 | | |
| 4 | 1859-1876 | FLYENAFLPFAMGVIAMS | nsp6@Mexico(NC_045512@Mexico: + : 10973-11842) | 36-53 |
| 4 | 1877-1886 | PRRARSVRYP linker 1-10 | | |
| 4 | 1887-1897 | IEELFYSYATH | 3′-to-5′_exonuclease(NC_045512: + : 18040-19620) | 363-373 |
| 4 | 1898-1907 | PRRARSVRYP linker 1-10 | | |
| 4 | 1908-1915 | GVYCCREH | nsp2(NC_045512: + : 806-2719) | 47-54 |
| 4 | 1916-1925 | PRRARSVRYP linker 1-10 | | |
| 4 | 1926-1944 | DKSAFVNLKQLPFFYYSDS | 3′-to-5′_exonuclease(NC_045512: + : 18040-19620) | 432-450 |
| 4 | 1945-1954 | PRRARSVRYP linker 1-10 | | |
| 4 | 1955-1968 | DYDCVSFCYMHHME | 3C-like_proteinase(NC_045512: + : 10055-10972) | 153-166 |
| 4 | 1969-1978 | PRRARSVRYP linker 1-10 | | |
| 4 | 1979-2000 | SDFVRATATIPIRASLPFGWLI | ORF3a_protein@Belgium(NC_045512@Belgium: + : 25393-26220) | 26-47 |
| 4 | 2001-2010 | PRRARSVRYP linker 1-10 | | |
| 4 | 2011-2020 | ARDLICAQKF | surface_glycoprotein(NC_045512: + : 21563-25384) | 846-855 |
| 4 | 2021-2030 | PRRARSVRYP linker 1-10 | | |
| 4 | 2031-2038 | ISNCVADY | surface_glycoprotein(NC_045512: + : 21563-25384) | 358-365 |
| 4 | 2039-2057 | PRRARSVRYP linker 1-10 | | |
| 4 | 2049-2063 | ISNCVADYSVLYNSA | surface_glycoprotein@Aruba(NC_045512@Aruba: + : 21563-25384) | 354-368 |
| 4 | 2064-2073 | PRRARSVRYP linker 1-10 | | |
| 4 | 2074-2090 | VPQEHYVRITGLYPTLN | helicase@Aruba(NC_045512@Aruba: + : 16237-18039) | 241-257 |
| 4 | 2091-2100 | PRRARSVRYP linker 1-10 | | |
| 4 | 2101-2112 | ALGKLQDVVNQN | surface_glycoprotein(NC_045512: + : 21563-25384) | 944-955 |
| 4 | 2113-2122 | PRRARSVRYP linker 1-10 | | |
| 4 | 2123-2133 | LRIAGHHLGRC | membrane_glycoprotein(NC_045512: + : 26523-27191) | 149-159 |
| 4 | 2134-2143 | PRRARSVRYP linker 1-10 | | |
| 4 | 2144-2162 | VKDCVLLHSYFTSDYYQLY | ORF3a_protein@Belgium(NC_045512@Belgium: + : 25393-26220) | 197-215 |
| 4 | 2163-2172 | PRRARSVRYP linker 1-10 | | |
| 4 | 2173-2180 | AALQIPFA | surface_glycoprotein(NC_045512: + : 21563-25384) | 892-899 |
| 4 | 2181-2190 | PRRARSVRYP linker 1-10 | | |
| 4 | 2191-2206 | FSNVTWFHAIHVSGTN | surface_glycoprotein@Peru(NC_045512@Peru: + : 21563-25384) | 59-74 |
| 4 | 2207-2216 | PRRARSVRYP linker 1-10 | | |
| 4 | 2217-2231 | HYVRITGLYPTLNIL | helicase@Indonesia(NC_045512@Indonesia: + : 16237-18039) | 245-259 |
| 4 | 2232-2241 | PRRARSVRYP linker 1-10 | | |
| 4 | 2242-2261 | DDRCILHCANFNVLFSTVFP | RNA-dependent_RNA_polymerase(NC_045512: + : 13442-13468 + 13468-16236) | 303-322 |
| 4 | 2262-2271 | PRRARSVRYP linker 1-10 | | |
| 4 | 2272-2281 | SSVLHSTQDF | surface_glycoprotein@Norway(NC_045512@Norway: + : 21563-25384) | 45-54 |
| 4 | 2282-2291 | PRRARSVRYP linker 1-10 | | |
| 4 | 2292-2299 | GSCGSVGF | 3C-like_proteinase(NC_045512: + : 10055-10972) | 143-150 |
| 4 | 2300-2309 | PRRARSVRYP linker 1-10 | | |
| 4 | 2310-2324 | YFTSDYYQLYSTQLI | ORF3a_protein@Indonesia(NC_045512@Indonesia: + : 25393-26220) | 206-220 |
| 4 | 2325-2334 | PRRARSVRYP linker 1-10 | | |
| 4 | 2335-2343 | LKLKDCVMY | nsp6@Aruba(NC_045512@Aruba: + : 10973-11842) | 105-113 |
| 4 | 2344-2353 | PRRARSVRYP linker 1-10 | | |
| 4 | 2354-2368 | RIIPARARVECFDKF | helicase@Aruba(NC_045512@Aruba: + : 16237-18039) | 332-346 |
| 4 | 2369-2378 | PRRARSVRYP linker 1-10 | | |
| 4 | 2379-2388 | TQNLYENQK | surface_glycoprotein(NC_045512: + : 21563-25384) | 912-921 |
| 4 | 2389-2398 | PRRARSVRYP linker 1-10 | | |
| 4 | 2399-2421 | NHDLYCQVHGNAHVASCDAIMTR | 3′-to-5′_exonuclease(NC_045512: + : 18040-19620) | 256-278 |
| 4 | 2422-2431 | PRRARSVRYP linker 1-10 | | |
| 4 | 2432-2439 | TDAVDCAL | surface_glycoprotein(NC_045512: + : 21563-25384) | 286-293 |
| 4 | 2440-2449 | PRRARSVRYP linker 1-10 | | |
| 4 | 2450-2463 | IKVCEFQFCNDPYY | surface_glycoprotein@CostaRica(NC_045512@CostaRica: + : 21563-25384) | 128-141 |
| 4 | 2464-2473 | PRRARSVRYP linker 1-10 | | |
| 4 | 2474-2483 | DPIHSLRVCV | nsp3(NC_045512: + : 2720-8554) | 339-348 |
| 4 | 2484-2493 | PRRARSVRYP linker 1-10 | | |
| 4 | 2494-2515 | LLYDANYFLCWHINCYDYCIPY | ORF3a_protein@Estonai(NC_045512@Estonia: + : 25393-26220) | 139-160 |

[0095] In certain embodiments, the vaccine comprises or expresses at least one of the concatemers of epitopes with intervening linker sequences (and as set forth in FIG. 20). In certain embodiments, the vaccine comprises or expresses at least two of the concatemers set forth below. In certain embodiments, the vaccine comprises or expresses three of the concatemers set forth below. In certain embodiments, the vaccine comprises or expresses all the concatemers set forth below.

TABLE 10

| concatemer | pos_in_concatemer | epitope | gene | pos_in_gene |
|---|---|---|---|---|
| 1 | 1-12 | NIGCNHTGVVGE | nsp2(NC_045512: + : 806-2719) | 250-261 |
| 1 | 13-22 | PRRARSVRYP linker 1-10 | | |
| 1 | 23-36 | LKEILVTYNCCDDD | RNA-dependent_RNA_polymerase(NC_045512: + : 13442-13468 + 13468-16236) | 142-155 |
| 1 | 37-46 | PRRARSVRYP linker 1-10 | | |
| 1 | 47-63 | CSNLLLQYGSFCTQLNR | surface_glycoprotein(NC_045512: + : 21563-25384) | 749-765 |
| 1 | 64-73 | PRRARSVRYP linker 1-10 | | |
| 1 | 74-89 | GSNVFQTRAGCLIGAE | surface_glycoprotein(NC_045512: + : 21563-25384) | 639-654 |
| 1 | 90-99 | PRRARSVRYP linker 1-10 | | |
| 1 | 100-107 | AEVQIDRL | surface_glycoprotein(NC_045512: + : 21563-25384) | 989-996 |
| 1 | 108-117 | PRRARSVRYP linker 1-10 | | |
| 1 | 118-129 | ISVTTEILPVSM | surface_glycoprotein(NC_045512: + : 21563-25384) | 720-731 |
| 1 | 130-139 | PRRARSVRYP linker 1-10 | | |
| 1 | 140-147 | FTGCVIAW | surface_glycoprotein(NC_045512: + : 21563-25384) | 429-436 |
| 1 | 148-157 | PRRARSVRYP linker 1-10 | | |
| 1 | 158-172 | INAACRKVQHMVVKA | 3′-to-5′_exonuclease(NC_045512: + : 18040-19620) | 305-319 |
| 1 | 173-182 | PRRARSVRYP linker 1-10 | | |
| 1 | 183-192 | ARDLICAQKF | surface_glycoprotein(NC_045512: + : 21563-25384) | 846-855 |
| 1 | 193-202 | PRRARSVRYP linker 1-10 | | |
| 1 | 203-210 | LPINVIVF | nsp3(NC_045512: + : 2720-8554) | 1718-1725 |
| 1 | 211-220 | PRRARSVRYP linker 1-10 | | |
| 1 | 221-247 | FSASTSAFVETVKGLDYKAFKQIVESC | nsp2(NC_045512: + : 806-2719) | 300-326 |
| 1 | 248-257 | PRRARSVRYP linker 1-10 | | |
| 1 | 258-273 | RKIFVDGVPFVVSTGY | RNA-dependent_RNA_polymerase(NC_045512: + : 13442-13468 + 13468-16236) | 331-346 |
| 1 | 274-283 | PRRARSVRYP linker 1-10 | | |
| 1 | 284-299 | FRELGVVHNQDVNLHS | RNA-dependent_RNA_polymerase(NC_045512: + : 13442-13468 + 13468-16236) | 348-363 |
| 1 | 300-309 | PRRARSVRYP linker 1-10 | | |
| 1 | 310-323 | EGVVDYGARFYFYT | nsp3(NC_045512: + : 2720-8554) | 595-608 |
| 1 | 324-333 | PRRARSVRYP linker 1-10 | | |
| 1 | 334-348 | TYACWHHSIGFDYVY | 3′-to-5′_exonuclease(NC_045512: + : 18040-19620) | 223-237 |
| 1 | 349-358 | PRRARSVRYP linker 1-10 | | |
| 1 | 359-368 | NEFYAYLRKH | RNA-dependent_RNA_polymerase(NC_045512: + : 13442-13468 + 13468-16236) | 743-752 |
| 1 | 369-378 | PRRARSVRYP linker 1-10 | | |
| 1 | 379-390 | AKLLHKPIVWHV | nsp3(NC_045512: + : 2720-8554) | 1165-1176 |
| 1 | 391-400 | PRRARSVRYP linker 1-10 | | |
| 1 | 401-408 | TDAVDCAL | surface_glycoprotein(NC_045512: + : 21563-25384) | 286-293 |
| 1 | 409-418 | PRRARSVRYP linker 1-10 | | |
| 1 | 419-428 | DVVAIDYKHY | nsp3(NC_045512: + : 2720-8554) | 1148-1157 |
| 1 | 429-438 | PRRARSVRYP linker 1-10 | | |
| 1 | 439-446 | KAVFISPY | helicase(NC_045512: + : 16237-18039) | 508-515 |
| 1 | 447-456 | PRRARSVRYP linker 1-10 | | |
| 1 | 457-464 | QIGVVREF | helicase(NC_045512: + : 16237-18039) | 492-499 |
| 1 | 465-474 | PRRARSVRYP linker 1-10 | | |
| 1 | 475-491 | YUADVFHLYLQYRIKLHD | RNA-dependent_RNA_polymerase(NC_045512: + : 13442-13468 + 13468-16236) | 877-893 |
| 1 | 492-501 | PRRARSVRYP linker 1-10 | | |
| 1 | 502-511 | VMCGGSLYVK | RNA-dependent_RNA_polymerase(NC_045512: + : 13442-13468 + 13468-16236) | 667-676 |
| 1 | 512-521 | PRRARSVRYP linker 1-10 | | |
| 1 | 522-535 | FGTVYEKLKPVLDW | nsp2(NC_045512: + : 806-2719) | 437-450 |
| 1 | 536-545 | PRRARSVRYP linker 1-10 | | |
| 1 | 546-558 | VFRVQPTESIVRF | surface_glycoprotein(NC_045512: + : 21563-25384) | 317-329 |
| 1 | 559-568 | PRRARSVRYP linker 1-10 | | |
| 1 | 569-588 | YVYLPYPDPSRILGAGCFVD | RNA-dependent_RNA_polymerase(NC_045512: + : 13442-13468 + 13468-16236) | 826-845 |
| 1 | 589-598 | PRRARSVRYP linker 1-10 | | |
| 1 | 599-613 | SYELQTPFEIKLAKK | nsp2(NC_045512: + : 806-2719) | 68-82 |
| 1 | 614-623 | PRRARSVRYP linker 1-10 | | |
| 1 | 624-646 | RVDFCGKGYHLMSFPQSAPHGVV | surface_glycoprotein(NC_045512: + : 21563-25384) | 1039-1061 |
| 1 | 647-656 | PRRARSVRYP linker 1-10 | | |
| 1 | 657-666 | VVADAVIKTL | nsp3(NC_045512: + : 2720-8554) | 56-65 |
| 1 | 667-676 | PRRARSVRYP linker 1-10 | | |
| 1 | 677-684 | ISNCVADY | surface_glycoprotein(NC_045512: + : 21563-25384) | 358-365 |
| 1 | 685-694 | PRRARSVRYP linker 1-10 | | |
| 1 | 695-706 | TRAKVGILCIMS | helicase(NC_045512: + : 16237-18039) | 566-577 |
| 1 | 707-716 | PRRARSVRYP linker 1-10 | | |
| 1 | 717-736 | IRRPFLCCKCCYDHVISTSH | helicase(NC_045512: + : 16237-18039) | 20-39 |
| 1 | 737-746 | PRRARSVRYP linker 1-10 | | |
| 1 | 747-763 | LECNVKTTEVVGDIILK | nsp3(NC_045512: + : 2720-8554) | 1244-1260 |
| 1 | 764-773 | PRRARSVRYP linker 1-10 | | |
| 1 | 774-783 | GNCDVVIGIV | surface_glycoprotein(NC_045512: + : 21563-25384) | 1124-1133 |
| 1 | 784-793 | PRRARSVRYP linker 1-10 | | |
| 1 | 794-832 | GCDVTDVTQLYLGGMSYYCKSHKPPISFPLCAN | helicase(NC_045512: + : 16237-18039) | 54-92 |
| | | GQVFGL | | |
| 1 | 833-842 | PRRARSVRYP linker 1-10 | | |
| 1 | 843-862 | RAKHYVYIGDPAQLPAPRTL | helicase(NC_045512: + : 16237-18039) | 392-411 |
| 2 | 1-13 | AFASEAARVVRSI | nsp2(NC_045512: + : 806-2719) | 355-367 |
| 2 | 14-23 | PRRARSVRYP linker 1-10 | | |
| 2 | 24-40 | AQSFLNRVCGVSAARLT | RNA-dependent_RNA_polymerase(NC_045512: + : 13442-13468 + 13468-16236) | 4-20 |
| 2 | 41-50 | PRRARSVRYP linker 1-10 | | |
| 2 | 51-64 | RNLQHRLYECLYRN | RNA-dependent_RNA_polymerase(NC_045512: + : 13442-13468 + 13468-16236) | 721-734 |
| 2 | 65-74 | PRRARSVRYP linker 1-10 | | |
| 2 | 75-87 | GVNLVAVPTGYVD | 3′-to-5′_exonuclease(NC_045512: + : 18040-19620) | 114-126 |
| 2 | 88-97 | PRRARSVRYP linker 1-10 | | |
| 2 | 98-107 | KQYGDCLGDI | surface_glycoprotein(NC_045512: + : 21563-25384) | 835-844 |
| 2 | 108-117 | PRRARSVRYP linker 1-10 | | |
| 2 | 118-126 | AGFSLWVYK | 3′-to-5′_exonuclease(NC_045512: + : 18040-19620) | 504-512 |
| 2 | 127-136 | PRRARSVRYP linker 1-10 | | |
| 2 | 137-147 | EQYVFCTVNAL | helicase(NC_045512: + : 16237-18039) | 353-363 |
| 2 | 148-157 | PRRARSVRYP linker 1-10 | | |
| 2 | 158-165 | YDPLQPEL | surface_glycoprotein(NC_045512: + : 21563-25384) | 1138-1145 |
| 2 | 166-175 | PRRARSVRYP linker 1-10 | | |
| 2 | 176-184 | SRELKVTFF | nsp3(NC_045512: + : 2720-8554) | 1134-1142 |
| 2 | 185-194 | PRRARSVRYP linker 1-10 | | |
| 2 | 195-202 | KLGASQRV | membrane_glycoprotein(NC_045512: + : 26523-27191) | 180-187 |
| 2 | 203-212 | PRRARSVRYP linker 1-10 | | |
| 2 | 213-222 | KACVEEVTTT | nsp3(NC_045512: + : 2720-8554) | 415-424 |
| 2 | 223-232 | PRRARSVRYP linker 1-10 | | |
| 2 | 233-247 | FKELLVYAADPAMHA | RNA-dependent_RNA_polymerase(NC_045512: + : 13442-13468 + 13468-16236) | 368-382 |
| 2 | 248-257 | PRRARSVRYP linker 1-10 | | |
| 2 | 258-265 | FKLASHMY | nsp3(NC_045512: + : 2720-8554) | 96-103 |
| 2 | 266-275 | PRRARSVRYP linker 1-10 | | |
| 2 | 276-283 | NNLVVMAY | nsp2(NC_045512: + : 806-2719) | 413-420 |
| 2 | 284-293 | PRRARSVRYP linker 1-10 | | |
| 2 | 294-325 | IMASLVLARKHTTCCSLSHRFYRLANECAQVL | RNA-dependent_RNA_polymerase(NC_045512: + : 13442-13468 + 13468-16236) | 632-663 |
| 2 | 326-335 | PRRARSVRYP linker 1-10 | | |
| 2 | 336-348 | LLNVPLHGTILTR | membrane_glycoprotein(NC_045512: + : 26523-27191) | 119-131 |
| 2 | 349-358 | PRRARSVRYP linker 1-10 | | |
| 2 | 359-367 | VTANVNALL | RNA-dependent_RNA_polymerase(NC_045512: + : 13442-13468 + 13468-16236) | 700-706 |
| 2 | 368-377 | PRRARSVRYP linker 1-10 | | |
| 2 | 378-390 | AIKCVPQADVEWK | 3′-to-5′_exonuclease(NC_045512: + : 18040-19620) | 337-349 |
| 2 | 391-400 | PRRARSVRYP linker 1-10 | | |
| 2 | 401-423 | SHGKQVVSDIDYVPLKSATCITR | 3′-to-5′_exonuclease(NC_045512: + : 18040-19620) | 454-476 |
| 2 | 424-433 | PRRARSVRYP linker 1-10 | | |
| 2 | 434-446 | KASCTLSEQLDFI | nsp2(NC_045512: + : 806-2719) | 30-42 |
| 2 | 447-456 | PRRARSVRYP linker 1-10 | | |
| 2 | 457-469 | ANFCALILAYCNK | nsp3(NC_045512: + : 2720-8554) | 890-902 |
| 2 | 470-479 | PRRARSVRYP linker 1-10 | | |
| 2 | 480-490 | IEELFYSYATH | 3′-to-5′_exonuclease(NC_045512: + : 18040-19620) | 363-373 |
| 2 | 491-500 | PRRARSVRYP linker 1-10 | | |
| 2 | 501-510 | SVELKHFFFA | RNA-dependent_RNA_polymerase(NC_045512: + : 13442-13468+ 13468-16236) | 434-443 |
| 2 | 511-520 | PRRARSVRYP linker 1-10 | | |
| 2 | 521-528 | DSYFVVKR | RNA-dependent_RNA_polymerase(NC_045512: + : 13442-13468+ 13468-16236) | 67-74 |
| 2 | 529-538 | PRRARSVRYP linker 1-10 | | |
| 2 | 539-549 | KGVQIPCTCGK | nsp3(NC_045512: + : 2720-8554) | 963-973 |
| 2 | 550-559 | PRRARSVRYP linker 1-10 | | |
| 2 | 560-579 | KLTCATTRQVVNVVTTKIAL | nsp3(NC_045512: + : 2720-8554) | 1923-1942 |
| 2 | 580-589 | PRRARSVRYP linker 1-10 | | |
| 2 | 590-599 | QEHYVRITGL | helicase(NC_045512: + : 16237-18039) | 243-252 |
| 2 | 600-609 | PRRARSVRYP linker 1-10 | | |
| 2 | 610-621 | SSPDAVTAYNGY | nsp3(NC_045512: + : 2720-8554) | 660-671 |
| 2 | 622-631 | PRRARSVRYP linker 1-10 | | |
| 2 | 632-643 | VTMPLGYVTHGL | nsp3(NC_045512: + : 2720-8554) | 628-639 |
| 2 | 644-653 | PRRARSVRYP linker 1-10 | | |
| 2 | 654-672 | LEILDITPCSFGGVSVITP | surface_glycoprotein(NC_045512: + : 21563-25384) | 582-600 |
| 2 | 673-682 | PRRARSVRYP linker 1-10 | | |
| 2 | 683-692 | DPIHSLRVCV | nsp3(NC_045512: + : 2720-8554) | 339-348 |
| 2 | 693-702 | PRRARSVRYP linker 1-10 | | |
| 2 | 703-717 | RTCCLCDRRATCFST | 3′-to-5′_exonuclease(NC_045512: + : 18040-19620) | 205-219 |
| 2 | 718-727 | PRRARSVRYP linker 1-10 | | |
| 2 | 728-747 | MTSCCSCLKGCCSCGSCCKF | surface_glycoprotein(NC_045512: + : 21563-25384) | 1237-1256 |
| 2 | 748-757 | PRRARSVRYP linker 1-10 | | |
| 2 | 758-770 | WNVVRIKIVQMLS | 3′-to-5′_exonuclease(NC_045512: + : 18040-19620) | 159-171 |
| 2 | 771-780 | PRRARSVRYP linker 1-10 | | |
| 2 | 781-799 | DKSAFVNLKQLPFFYYSDS | 3′-to-5′_exonuclease(NC_045512: + : 18040-19620) | 432-450 |
| 2 | 800-809 | PRRARSVRYP linker 1-10 | | |
| 2 | 810-821 | YPSLETIQITIS | nsp3(NC_045512: + : 2720-8554) | 1483-1494 |
| 2 | 822-831 | PRRARSVRYP linker 1-10 | | |
| 2 | 832-847 | TVLKKCKSAFYILPSI | nsp3(NC_045512: + : 2720-8554) | 526-541 |
| 3 | 1-10 | ETFVTHSKGL | nsp2(NC_045512: + : 806-2719) | 527-536 |
| 3 | 11-20 | PRRARSVRYP linker 1-10 | | |
| 3 | 21-29 | RSVYPVASP | nsp2(NC_045512: + : 806-2719) | 121-129 |
| 3 | 30-39 | PRRARSVRYP linker 1-10 | | |
| 3 | 40-62 | NHDLYCQVHGNAHVASCDAIMTR | 3′-to-5′_exonuclease(NC_045512: + : 18040-19620) | 256-278 |
| 3 | 63-72 | PRRARSVRYP linker 1-10 | | |
| 3 | 73-84 | FNCYFPLQSYGF | surface_glycoprotein(NC_045512: + : 21563-25384) | 486-497 |
| 3 | 85-94 | PRRARSVRYP linker 1-10 | | |
| 3 | 95-109 | VNCTEVPVAIHADQL | surface_glycoprotein(NC_045512: + : 21563-25384) | 615-629 |
| 3 | 110-119 | PRRARSVRYP linker 1-10 | | |
| 3 | 120-170 | HFAIGLALYYPSARIVYTACSHAAVDALCEKAL | helicase(NC_045512: + : 16237-18039) | 290-340 |
| | | KYLPIDKCSRIIPARARV | | |
| 3 | 171-180 | PRRARSVRYP linker 1-10 | | |
| 3 | 181-195 | FSVAALTNNVAFQTV | RNA-dependent_RNA_polymerase(NC_045512: + : 13442-13468+ 13468-16236) | 396-410 |
| 3 | 196-205 | PRRARSVRYP linker 1-10 | | |
| 3 | 206-213 | PSFLGRYM | nsp3(NC_045512: + : 2720-8554) | 822-829 |
| 3 | 214-223 | PRRARSVRYP linker 1-10 | | |
| 3 | 224-243 | GYLPQNAVVKIYCPACHNSE | nsp2(NC_045512: + : 806-2719) | 178-197 |
| 3 | 244-253 | PRRARSVRYP linker 1-10 | | |
| 3 | 254-261 | YDKLVSSF | nsp3(NC_045512: + : 2720-8554) | 365-372 |
| 3 | 262-271 | PRRARSVRYP linker 1-10 | | |
| 3 | 272-283 | HEFCSQHTMLVK | RNA-dependent_RNA_polymerase(NC_045512: + : 13442-13468+ 13468-16236) | 821-821 |
| 3 | 284-293 | PRRARSVRYP linker 1-10 | | |
| 3 | 294-309 | TGLHPTQAPTHLSVDT | 3′-to-5′_exonuclease(NC_045512: + : 18040-19620) | 16-31 |
| 3 | 310-319 | PRRARSVRYP linker 1-10 | | |
| 3 | 320-330 | SELVIGAVILR | membrane_glycoprotein(NC_045512: + : 26523-27191) | 136-146 |
| 3 | 331-340 | PRRARSVRYP linker 1-10 | | |
| 3 | 341-352 | IEVQGYKSVNIT | nsp3(NC_045512: + : 2720-8554) | 13-24 |
| 3 | 353-362 | PRRARSVRYP linker 1-10 | | |
| 3 | 363-382 | FCKLHNWNCVNCDTFCAGST | nsp3(NC_045512: + : 2720-8554) | 1626-1645 |
| 3 | 383-392 | PRRARSVRYP linker 1-10 | | |
| 3 | 393-411 | KLNVGDYFVLTSHTVMPLS | helicase(NC_045512: + : 16237-18039) | 218-236 |
| 3 | 412-421 | PRRARSVRYP linker 1-10 | | |
| 3 | 422-444 | TIATYCTGSIPCSVCLSGLDSLD | nsp3(NC_045512: + : 2720-8554) | 1459-1481 |
| 3 | 445-454 | PRRARSVRYP linker 1-10 | | |
| 3 | 455-464 | FCLEASFNYL | nsp3(NC_045512: + : 2720-8554) | 1931-1400 |
| 3 | 465-474 | PRRARSVRYP linker 1-10 | | |
| 3 | 475-484 | KCAYWVPRAS | nsp2(NC_045512: + : 806-2719) | 239-248 |
| 3 | 485-494 | PRRARSVRYP linker 1-10 | | |
| 3 | 495-508 | SYLFQHANLDSCKR | nsp3(NC_045512: + : 2720-8554) | 915-928 |
| 3 | 509-518 | PRRARSVRYP linker 1-10 | | |
| 3 | 519-528 | TQNVLYENQK | surface_glycoprotein(NC_045512: + : 21563-25384) | 912-921 |
| 3 | 529-538 | PRRARSVRYP linker 1-10 | | |
| 3 | 539-553 | QIELKFNPPALQDAY | nsp3(NC_045512: + : 2720-8554) | 867-881 |
| 3 | 554-563 | PRRARSVRYP linker 1-10 | | |
| 3 | 564-581 | IKDLPKEITVATSRTLSY | membrane_glycoprotein(NC_045512: + : 26523-27191) | 161-178 |
| 3 | 582-591 | PRRARSVRYP linker 1-10 | | |
| 3 | 592-602 | YELKHGTFTCA | nsp3(NC_045512: + : 2720-8554) | 996-1006 |
| 3 | 603-612 | PRRARSVRYP linker 1-10 | | |
| 3 | 613-637 | SDIDITFLKKDAPYIVGDVVQEGVL | nsp3(NC_045512: + : 2720-8554) | 454-478 |
| 3 | 638-647 | PRRARSVRYP linker 1-10 | | |
| 3 | 648-657 | GVITHDVSSA | helicase(NC_045512: + : 16237-18039) | 478-487 |
| 3 | 658-667 | PRRARSVRYP linker 1-10 | | |
| 3 | 668-676 | TENLLLYID | nsp3(NC_045512: + : 2720-8554) | 432-440 |
| 3 | 677-686 | PRRARSVRYP linker 1-10 | | |
| 3 | 687-698 | VPVVDAYYSLLM | RNA-dependent_RNA_polymerase(NC_045512: + : 13442-13468+ 13468-16236) | 231-242 |
| 3 | 699-708 | PRRARSVRYP linker 1-10 | | |
| 3 | 709-720 | ALGKLQDVVNQN | surface_glycoprotein(NC_045512: + : 21563-25384) | 944-955 |
| 3 | 721-730 | PRRARSVRYP linker 1-10 | | |
| 3 | 731-739 | EVFAQVKQI | surface_glycoprotein(NC_045512: + : 21563-25384) | 780-788 |
| 3 | 740-749 | PRRARSVRYP linker 1-10 | | |
| 3 | 750-759 | NYQCGHYKHI | nsp3(NC_045512: + : 2720-8554) | 1012-1021 |
| 3 | 760-769 | PRRARSVRYP linker 1-10 | | |
| 3 | 770-780 | AVHECFVKRVD | 3′-to-5′_exonuclease(NC_045512: + : 18040-19620) | 281-291 |
| 3 | 781-790 | PRRARSVRYP linker 1-10 | | |
| 3 | 791-803 | ATNVVIKVCEFQF | surface_glycoprotein(NC_045512: + : 21563-25384) | 123-135 |
| 3 | 804-813 | PRRARSVRYP linker 1-10 | | |
| 3 | 814-821 | SVDCTMYI | surface_glycoprotein(NC_045512: + : 21563-25384) | 735-742 |
| 3 | 822-831 | PRRARSVRYP linker 1-10 | | |
| 3 | 832-849 | LFVVEVVDKYFDCYDGGC | RNA-dependent_RNA_polymerase(NC_045512: + : 13442-13468+ 13468-16236) | 470-487 |
| 4 | 1-10 | ACIDCSARHI | nsp3(NC_045512: + : 2720-8554) | 1872-1881 |
| 4 | 11-20 | PRRARSVRYP linker 1-10 | | |
| 4 | 21-38 | LNDLCFTNVYADSFVIRG | surface_glycoprotein(NC_045512: + : 21563-25384) | 387-404 |
| 4 | 39-48 | PRRARSVRYP linker 1-10 | | |
| 4 | 49-62 | SDRVVFVLWAHGFE | 3′-to-5′_exonuclease(NC_045512: + : 18040-19620) | 178-191 |
| 4 | 63-72 | PRRARSVRYP linker 1-10 | | |
| 4 | 73-80 | MADLVYAL | RNA-dependent_RNA_polymerase(NC_045512: + : 13442-13468+ 13468-16236) | 124-131 |
| 4 | 81-90 | PRRARSVRYP linker 1-10 | | |
| 4 | 91-99 | AAYYVGYL | surface_glycoprotein(NC_045512: + : 21563-25384) | 262-270 |
| 4 | 100-109 | PRRARSVRYP linker 1-10 | | |
| 4 | 110-131 | GYQPYRVVVLSFELLHAPATVC | surface_glycoprotein(NC_045512: + : 21563-25384) | 504-525 |
| 4 | 132-141 | PRRARSVRYP linker 1-10 | | |
| 4 | 142-150 | YDLSVVNAR | helicase(NC_045512: + : 16237-18039) | 382-390 |
| 4 | 151-160 | PRRARSVRYP linker 1-10 | | |
| 4 | 161-170 | GTNLPLQLGF | 3′-to-5′_exonuclease(NC_045512: + : 18040-19620) | 102-111 |
| 4 | 171-180 | PRRARSVRYP linker 1-10 | | |
| 4 | 181-200 | DDRVILHCANFNVLFSTVFP | RNA-dependent_RNA_polymerase(NC_045512: + : 13442-13468+ 13468-16236) | 303-322 |
| 4 | 201-210 | PRRARSVRYP linker 1-10 | | |
| 4 | 211-218 | CLNRVCTN | nsp3(NC_045512: + : 2720-8554) | 1342-1349 |
| 4 | 219-228 | PRRARSVRYP linker 1-10 | | |
| 4 | 229-248 | SEAVEAPLVGTPVCINGLML | nsp2(NC_045512: + : 806-2719) | 591-610 |
| 4 | 249-258 | PRRARSVRYP linker 1-10 | | |
| 4 | 259-266 | RVEAFEYY | nsp3(NC_045512: + : 2720-8554) | 810-817 |
| 4 | 267-276 | PRRARSVRYP linker 1-10 | | |
| 4 | 277-289 | IVKFISTCACEIV | nsp2(NC_045512: + : 806-2719) | 468-480 |
| 4 | 290-299 | PRRARSVRYP linker 1-10 | | |
| 4 | 300-307 | GVYCCREH | nsp2(NC_045512: + : 806-2719) | 47-54 |
| 4 | 308-317 | PRRARSVRYP linker 1-10 | | |
| 4 | 318-332 | ERFVSLAIDAYPLTK | RNA-dependent_RNA_polymerase(NC_045512: + : 13442-13468+ 13468-16236) | 857-871 |
| 4 | 333-342 | PRRARSVRYP linker 1-10 | | |
| 4 | 343-354 | VRTNVYLAVFDK | nsp3(NC_045512: + : 2720-8554) | |
| 4 | 355-364 | PRRARSVRYP linker 1-10 | | 351-362 |
| 4 | 365-374 | VTGLFKDCSK | 3′-to-5′_exonuclease(NC_045512: + : 18040-19620) | |
| 4 | 375-384 | PRRARSVRYP linker 1-10 | | 4-13 |
| 4 | 385-395 | LRIAGHHLGRC | membrane_glycoprotein(NC_045512: + : 26523-27191) | 149-159 |
| 4 | 396-405 | PRRARSVRYP linker 1-10 | | |
| 4 | 406-413 | ARDLSLQF | nsp3(NC_045512: + : 2720-8554) | |
| 4 | 414-423 | PRRARSVRYP linker 1-10 | | 1652-1659 |
| 4 | 424-434 | DNVLSTFISAA | nsp3(NC_045512: + : 2720-8554) | |
| 4 | 435-444 | PRRARSVRYP linker 1-10 | | 1809-1819 |
| 4 | 445-461 | PNFVFPLNSIIKTIQPR | nsp2(NC_045512: + : 806-2719) | 91-107 |
| 4 | 462-471 | PRRARSVRYP linker 1-10 | | |
| 4 | 472-479 | IETISLAG | nsp3(NC_045512: + : 2720-8554) | 684-691 |
| 4 | 480-489 | PRRARSVRYP linker 1-10 | | |
| 4 | 490-502 | YAKPFLNKVVSTT | nsp3(NC_045512: + : 2720-8554) | |
| 4 | 503-512 | PRRARSVRYP linker 1-10 | | 1323-1335 |
| 4 | 513-528 | VREVLSDRELHLSWEV | helicase(NC_045512: + : 16237-18039) | 154-169 |
| 4 | 529-538 | PRRARSVRYP linker | | |
| 4 | 539-554 | ANSIVCRFDTRVLSNL | 3′-to-5′_exonuclease(NC_045512: + : 18040-19620) | 394-409 |
| 4 | 555-564 | PRRARSVRYP linker | | |
| 4 | 565-580 | LQSLQTYVTQQLIRAA | surface_glycoprotein(NC_045512: + : 21563-25384) | 1001-1016 |
| 4 | 581-590 | PRRARSVRYP linker 1-10 | | |
| 4 | 591-600 | RHSLSHFVNL | nsp3(NC_045512: + : 2720-8554) | 1697-1706 |
| 4 | 601-610 | PRRARSVRYP linker 1-10 | | |
| 4 | 611-620 | VQQESPFVMM | nsp3(NC_045512: + : 2720-8554) | 980-989 |
| 4 | 621-630 | PRRARSVRYP linker 1-10 | | |
| 4 | 631-641 | VVNAANVYLKH | nsp3(NC_045512: + : 2720-8554) | 239-249 |
| 4 | 642-651 | PRRARSVRYP linker 1-10 | | |
| 4 | 652-665 | TKDVVECLKLSHQS | nsp3(NC_045512: + : 2720-8554) | 1830-1843 |
| 4 | 666-675 | PRRARSVRYP linker 1-10 | | |
| 4 | 676-686 | KESVQTFFKLV | nsp2(NC_045512: + : 806-2719) | 492-502 |
| 4 | 687-696 | PRRARSVRYP linker 1-10 | | |
| 4 | 697-716 | LQKAAITILDGISQYSLRLI | nsp2(NC_045512: + : 806-2719) | 382-401 |
| 4 | 717-726 | PRRARSVRYP linker 1-10 | | |
| 4 | 727-734 | PEHSLAEY | nsp2(NC_045512: + : 806-2719) | 200-207 |
| 4 | 735-744 | PRRARSVRYP linker 1-10 | | |
| 4 | 745-752 | SLIDLQEL | surface_glycoprotein(NC_045512: + : 21563-25384) | 1196-1203 |
| 4 | 753-762 | PRRARSVRYP linker 1-10 | | |
| 4 | 763-771 | FFSNVTWFH | surface_glycoprotein(NC_045512: + : 21563-25384) | 58-66 |
| 4 | 772-781 | PRRARSVRYP linker 1-10 | | |
| 4 | 782-794 | NPVLPFNDGVYFA | surface_glycoprotein(NC_045512: + : 21563-25384) | |
| 4 | 795-804 | PRRARSVRYP linker 1-10 | | 81-93 |
| 4 | 805-813 | MPVCVETKA | nsp3(NC_045512: + : 2720-8554) | 571-579 |
| 4 | 814-823 | PRRARSVRYP linker 1-10 | | |
| 4 | 824-833 | KSASVYYSQL | nsp3(NC_045512: + : 2720-8554) | 1737-1746 |
| 4 | 834-843 | PRRARSVRYP linker 1-10 | | |
| 4 | 844-851 | AALQIPFA | surface_glycoprotein(NC_045512: + : 21563-25384) | 892-899 |

[0096] In certain embodiments, the vaccine comprises or expresses at least one of the concatemers of epitopes with intervening linker sequences (and as set forth in FIG. 21). In certain embodiments, the vaccine comprises or expresses at least two of the concatemers set forth below. In certain embodiments, the vaccine comprises or expresses three of the concatemers set forth below. In certain embodiments, the vaccine comprises or expresses all the concatemers set forth below.

TABLE 11

| | pos_ | | | |
|---|---|---|---|---|
| | in_ | | | pos_in_ |
| concatemer | concat | epitope | gene | gene |
| 1 | 1-12 | NIGCNHTGVVGE | nsp2(NC_045512: + : 806-2719) | 250-261 |
| 1 | 13-22 | PRRARSVRYP | linker | 1-10 |
| 1 | 23-36 | LKEILVTYNCCDDD | RNA-dependent_RNA_polymerase(NC_045512: + : 13442-13468 + 13468-16236) | 142-155 |
| 1 | 37-46 | PRRARSVRYP | linker | 1-10 |
| 1 | 47-61 | ISNCVADYSVLYNSA | surface_glycoprotein@Aruba(NC_045512@Aruba: + : 21563-25384) | 354-368 |
| 1 | 62-71 | PRRARSVRYP | linker | 1-10 |
| 1 | 72-86 | AYYVGYLQPRTFLLK | surface_glycoprotein@Aruba(NC_045512@Aruba: + : 21563-25384) | 260-274 |
| 1 | 87-96 | PRRARSVRYP | linker | 1-10 |
| 1 | 97-104 | REGVFVSN | surface_glycoprotein@Aruba(NC_045512@Aruba: + : 21563-25384) | 1087-1094 |
| 1 | 105-114 | PRRARSVRYP | linker | 1-10 |
| 1 | 115-126 | FRSSVLHSTQDL | surface_glycoprotein@Aruba(NC_045512@Aruba: + : 21563-25384) | 43-54 |
| 1 | 127-136 | PRRARSVRYP | linker | 1-10 |
| 1 | 137-147 | EQYVFCTVNAL | helicase(NC_045512: + : 16237-18039) | 353-363 |
| 1 | 148-157 | PRRARSVRYP | linker | 1-10 |
| 1 | 158-171 | ANPVLPFNDGVYFA | surface_glycoprotein@Austria(NC_045512@Austria: + : 21563-25384) | 77-90 |
| 1 | 172-181 | PRRARSVRYP | linker | 1-10 |
| 1 | 182-196 | ERFVSLAIDAYPLTK | RNA-dependent_RNA_polymerase(NC_045512: + : 13442-13468 + 13468-16236) | 857-871 |
| 1 | 197-206 | PRRARSVRYP | linker | 1-10 |
| 1 | 207-214 | YDKLVSSF | nsp3(NC_045512: + : 2720-8554) | 365-372 |
| 1 | 215-224 | PRRARSVRYP | linker | 1-10 |
| 1 | 225-244 | LQKAAITILDGISQYSLRLI | nsp2(NC_045512: + : 806-2719) | 382-401 |
| 1 | 245-254 | PRRARSVRYP | linker | 1-10 |
| 1 | 255-264 | KACVEEVTTT | nsp3(NC_045512: + : 2720-8554) | 415-424 |
| 1 | 265-274 | PRRARSVRYP | linker | 1-10 |
| 1 | 275-285 | KESVQTFFKLV | nsp2(NC_045512: + : 806-2719) | 492-502 |
| 1 | 286-295 | PRRARSVRYP | linker | 1-10 |
| 1 | 296-313 | LFVVEVVDKYFDCYDGGC | RNA-dependent_RNA_polymerase(NC_045512: + : 13442-13468 + 13468-16236) | 470-487 |
| 1 | 314-323 | PRRARSVRYP | linker | 1-10 |
| 1 | 324-339 | FRELGVVHNQDVNLHS | RNA-dependent_RNA_polymerase(NC_045512: + : 13442-13468 + 13468-16236) | 348-363 |
| 1 | 340-349 | PRRARSVRYP | linker | 1-10 |
| 1 | 350-360 | AVHECFVKRVD | 3′-to-5′_exonuclease(NC_045512: + : 18040-19620) | 281-291 |
| 1 | 361-370 | PRRARSVRYP | linker | 1-10 |
| 1 | 371-385 | EFQFCNDPFLGVYYH | surface_glycoprotein@Chile(NC_045512@Chile: + : 21563-25384) | 132-146 |
| 1 | 386-395 | PRRARSVRYP | linker | 1-10 |
| 1 | 396-404 | SPDVDLADI | surface_glycoprotein@Chile(NC_045512@Chile: + : 21563-25384) | 1161-1169 |
| 1 | 405-414 | PRRARSVRYP | linker | 1-10 |
| 1 | 415-426 | IEVQGYKSVNIT | nsp3(NC_045512: + : 2720-8554) | 13-24 |
| 1 | 427-436 | PRRARSVRYP | linker | 1-10 |
| 1 | 437-448 | YPSLETIQITIS | nsp3(NC_045512: + : 2720-8554) | 1483-1494 |
| 1 | 449-458 | PRRARSVRYP | linker | 1-10 |
| 1 | 459-468 | KSASVYYSQL | nsp3(NC_045512: + : 2720-8554) | 1737-1746 |
| 1 | 469-478 | PRRARSVRYP | linker | 1-10 |
| 1 | 479-488 | VQQESPFVMM | nsp3(NC_045512: + : 2720-8554) | 980-989 |
| 1 | 489-498 | PRRARSVRYP | linker | 1-10 |
| 1 | 499-509 | LRIAGHHLGRC | membrane_glycoprotein(NC_045512: + : 26523-27191) | 149-159 |
| 1 | 510-519 | PRRARSVRYP | linker | 1-10 |
| 1 | 520-535 | TGLHPTQAPTHLSVDT | 3′-to-5′_exonuclease(NC_045512: + : 18040-19620) | 16-31 |
| 1 | 536-545 | PRRARSVRYP | linker | 1-10 |
| 1 | 546-561 | ANSIVCRFDTRVLSNL | 3′-to-5′_exonuclease(NC_045512: + : 18040-19620) | 394-409 |
| 1 | 562-571 | PRRARSVRYP | linker | 1-10 |
| 1 | 572-580 | SRELKVTFF | nsp3(NC_045512: + : 2720-8554) | 1134-1142 |
| 1 | 581-590 | PRRARSVRYP | linker | 1-10 |
| 1 | 591-613 | GKIQDSLFSTASALGKLQDVVNQ | surface_glycoprotein@NorthMacedonia(NC_045512@NorthMacedonia: + : 21563-25384) | 928-950 |
| 1 | 614-623 | PRRARSVRYP | linker | 1-10 |
| 1 | 624-638 | ARSVARQSIIAYTMS | surface_glycoprotein@Mozambique(NC_045512@Mozambique: + : 21563-25384) | 680-694 |
| 1 | 639-648 | PRRARSVRYP | linker | 1-10 |
| 1 | 649-656 | PEHSLAEY | nsp2(NC_045512: + : 806-2719) | 200-207 |
| 1 | 657-666 | PRRARSVRYP | linker | 1-10 |
| 1 | 667-689 | RVDFCGKGYHLMSFPQSAPHGVV | surface_glycoprotein(NC_045512: + : 21563-25384) | 1039-1061 |
| 1 | 690-699 | PRRARSVRYP | linker | 1-10 |
| 1 | 700-712 | NFRVQPTESIVRF | surface_glycoprotein(NC_045512: + : 21563-25384) | 317-329 |
| 1 | 713-722 | PRRARSVRYP | linker | 1-10 |
| 1 | 723-738 | GSNVFQTRAGCLIGAE | surface_glycoprotein(NC_045512: + : 21563-25384) | 639-654 |
| 1 | 739-748 | PRRARSVRYP | linker | 1-10 |
| 1 | 749-761 | NPVLPFNDGVYFA | surface_glycoprotein(NC_045512: + : 21563-25384) | 81-93 |
| 1 | 762-771 | PRRARSVRYP | linker | 1-10 |
| 1 | 772-783 | ALGKLQDVVNQN | surface_glycoprotein(NC_045512: + : 21563-25384) | 944-955 |
| 1 | 784-793 | PRRARSVRYP | linker | 1-10 |
| 1 | 794-801 | PVLKGVKL | surface_glycoprotein@Aruba(NC_045512@Aruba: + : 21563-25384) | 1259-1266 |
| 1 | 802-811 | PRRARSVRYP | linker | 1-10 |
| 1 | 812-838 | FSASTSAFVETVKGLDYKAFKQIVESC | nsp2(NC_045512: + : 806-2719) | 300-326 |
| 1 | 839-848 | PRRARSVRYP | linker | 1-10 |
| 1 | 849-856 | AALQIPFA | surface_glycoprotein(NC_045512: + : 21563-25384) | 892-899 |
| 1 | 857-866 | PRRARSVRYP | linker | 1-10 |
| 1 | 867-877 | RFQLHRSYLTP | surface_glycoprotein@Austria(NC_045512@Austria: + : 21563-25384) | 233-243 |
| 1 | 878-887 | PRRARSVRYP | linker | 1-10 |
| 1 | 888-906 | QVAVLYQDVNCTEVPVAIH | surface_glycoprotein@China(NC_045512@China: + : 21563-25384) | 607-625 |
| 1 | 907-916 | PRRARSVRYP | linker | 1-10 |
| 1 | 917-928 | FSNVTWFHAIVS | surface_glycoprotein@Ghana(NC_045512@Ghana: + : 21563-25384) | 59-70 |
| 1 | 929-938 | PRRARSVRYP | linker | 1-10 |
| 1 | 939-951 | WNVVRIKIVQMLS | 3′-to-5′_exonuclease(NC_045512: + : 18040-19620) | 159-171 |
| 1 | 952-961 | PRRARSVRYP | linker | 1-10 |
| 1 | 962-976 | QIELKFNPPALQDAY | nsp3(NC_045512: + : 2720-8554) | 867-881 |
| 1 | 977-986 | PRRARSVRYP | linker | 1-10 |
| 1 | 987-1009 | SHGKQVVSDIDYVPLKSATCITR | 3′-to-5′_exonuclease(NC_045512: + : 18040-19620) | 454-476 |
| 1 | 1010-1019 | PRRARSVRYP | linker | 1-10 |
| 1 | 1020-1033 | ETKCTLKSFTVEKG | surface_glycoprotein@Aruba(NC_045512@Aruba: + : 21563-25384) | 294-307 |
| 1 | 1034-1043 | PRRARSVRYP | linker | 1-10 |
| 1 | 1044-1057 | LVLLPLVSSQCVNF | surface_glycoprotein@Brazil(NC_045512@Brazil: + : 21563-25384) | 5-18 |
| 1 | 1058-1067 | PRRARSVRYP | linker | 1-10 |
| 1 | 1068-1076 | FFSNVTWFH | surface_glycoprotein(NC_045512: + : 21563-25384) | 58-66 |
| 1 | 1077-1086 | PRRARSVRYP | linker | 1-10 |
| 1 | 1087-1106 | IRRPFLCCKCCYDHVISTSH | helicase(NC_045512: + : 16237-18039) | 20-39 |
| 1 | 1107-1116 | PRRARSVRYP | linker | 1-10 |
| 1 | 1117-1127 | VLYQGVNCTEV | surface_glycoprotein@Aruba(NC_045512@Aruba: + : 21563-25384) | 606-616 |
| 1 | 1128-1137 | PRRARSVRYP | linker | 1-10 |
| 1 | 1138-1169 | IMASLVLARKHTTCCSLSHRF | RNA-dependent_RNA_polymerase(NC_045512: + : 13442-13468 + 13468-16236) | 632-663 |
| | | YRLANECAQVL | | |
| 1 | 1170-1179 | PRRARSVRYP | linker | 1-10 |
| 1 | 1180-1192 | LLNVPLHGTILTR | membrane_glycoprotein(NC_045512: + : 26523-27191) | 119-131 |
| 1 | 1193-1202 | PRRARSVRYP | linker | 1-10 |
| 1 | 1203-1213 | VVNAANVYLKH | nsp3(NC_045512: + : 2720-8554) | 239-249 |
| 2 | 1-13 | AFASEAARVVRSI | nsp2(NC_045512: + : 806-2719) | 355-367 |
| 2 | 14-23 | PRRARSVRYP | linker | 1-10 |
| 2 | 24-40 | AQSFLNRVCGVSAARLT | RNA-dependent_RNA_polymerase(NC_045512: + : 13442-13468 + 13468-16236) | 4-20 |
| 2 | 41-50 | PRRARSVRYP | linker | 1-10 |
| 2 | 51-64 | SDRVVFVLWAHGFE | 3′-to-5′_exonuclease(NC_045512: + : 18040-19620) | 178-191 |
| 2 | 65-74 | PRRARSVRYP | linker | 1-10 |
| 2 | 75-84 | SVLNDILARL | surface_glycoprotein@Aruba(NC_045512@Aruba: + : 21563-25384) | 971-980 |
| 2 | 85-94 | PRRARSVRYP | linker | 1-10 |
| 2 | 95-110 | FLVLLPLVSSQCVNLT | surface_glycoprotein@Aruba(NC_045512@Aruba: + : 21563-25384) | 4-19 |
| 2 | 111-120 | PRRARSVRYP | linker | 1-10 |
| 2 | 121-129 | AGFSLWVYK | 3′-to-5′_exonuclease(NC_045512: + : 18040-19620) | 504-512 |
| 2 | 130-139 | PRRARSVRYP | linker | 1-10 |
| 2 | 140-159 | PINLVRGLPQGFSALEPLVD | surface_glycoprotein@Austria(NC_045512@Austria: + : 21563-25384) | 205-224 |
| 2 | 160-169 | PRRARSVRYP | linker | 1-10 |
| 2 | 170-181 | EVFAQVKQIYKT | surface_glycoprotein@Aruba(NC_045512@Aruba: + : 21563-25384) | 776-787 |
| 2 | 182-191 | PRRARSVRYP | linker | 1-10 |
| 2 | 192-204 | RSVASQSIIAYTM | surface_glycoprotein@Aruba(NC_045512@Aruba: + : 21563-25384) | 681-693 |
| 2 | 205-214 | PRRARSVRYP | linker | 1-10 |
| 2 | 215-222 | PSFLGRYM | nsp3(NC_045512: + : 2720-8554) | 822-829 |
| 2 | 223-232 | PRRARSVRYP | linker | 1-10 |
| 2 | 233-249 | YADVFHLYLQYIRKLHD | RNA-dependent_RNA_polymerase(NC_045512: + : 13442-13468 + 13468-16236) | 877-893 |
| 2 | 250-259 | PRRARSVRYP | linker | 1-10 |
| 2 | 260-270 | SELVIGAVILR | membrane_glycoprotein(NC_045512: + : 26523-27191) | 136-146 |
| 2 | 271-280 | PRRARSVRYP | linker | 1-10 |
| 2 | 281-290 | KCAYWVPRAS | nsp2(NC_045512: + : 806-2719) | 239-248 |
| 2 | 291-300 | PRRARSVRYP | linker | 1-10 |
| 2 | 301-316 | RKIFVDGVPFVVSTGY | RNA-dependent_RNA_polymerase(NC_045512: + : 13442-13468 + 13468-16236) | 331-346 |
| 2 | 317-326 | PRRARSVRYP | linker | 1-10 |
| 2 | 327-334 | GVYCCREH | nsp2(NC_045512: + : 806-2719) | 47-54 |
| 2 | 335-344 | PRRARSVRYP | linker | 1-10 |
| 2 | 345-362 | IKDLPKEITVATSRTLSY | membrane_glycoprotein(NC_045512: + : 26523-27191) | 161-178 |
| 2 | 363-372 | PRRARSVRYP | linker | 1-10 |
| 2 | 373-394 | NVVIKVCEFQFCNYPFLGVYYH | surface_glycoprotein@Brazil(NC_045512@Brazil: + : 21563-25384) | 125-146 |
| 2 | 395-404 | PRRARSVRYP | linker | 1-10 |
| 2 | 405-412 | EIYQAGSK | surface_glycoprotein@Mexico(NC_045512@Mexico: + : 21563-25384) | 471-478 |
| 2 | 413-422 | PRRARSVRYP | linker | 1-10 |
| 2 | 423-432 | KQYGDCLGNI | surface_glycoprotein@Jordan(NC_045512@Jordan: + : 21563-25384) | 831-840 |
| 2 | 433-442 | PRRARSVRYP | linker | 1-10 |
| 2 | 443-456 | SVASQSIIAYTMSL | surface_glycoprotein@Austria(NC_045512@Austria: + : 21563-25384) | 678-691 |
| 2 | 457-466 | PRRARSVRYP | linker | 1-10 |
| 2 | 467-476 | FCLEASFNYL | nsp3(NC_045512: + : 2720-8554) | 1391-1400 |
| 2 | 477-486 | PRRARSVRYP | linker | 1-10 |
| 2 | 487-501 | VNCTEVPVAIHADQL | surface_glycoprotein(NC_045512: + : 21563-25384) | 615-629 |
| 2 | 502-511 | PRRARSVRYP | linker | 1-10 |
| 2 | 512-521 | NYQCGHYKHI | nsp3(NC_045512: + : 2720-8554) | 1012-1021 |
| 2 | 522-531 | PRRARSVRYP | linker | 1-10 |
| 2 | 532-548 | SAAYYVGYLQLRTFLLK | surface_glycoprotein@Italy(NC_045512@Italy: + : 21563-25384) | 258-274 |
| 2 | 549-558 | PRRARSVRYP | linker | 1-10 |
| 2 | 559-566 | IETISLAG | nsp3(NC_045512: + : 2720-8554) | 684-691 |
| 2 | 567-576 | PRRARSVRYP | linker | 1-10 |
| 2 | 577-593 | PNFVFPLNSIIKTIQPR | nsp2(NC_045512: + : 806-2719) | 9 1-107 |
| 2 | 594-603 | PRRARSVRYP | linker | 1-10 |
| 2 | 604-614 | YELKHGTFTCA | nsp3(NC_045512: + : 2720-8554) | 996-1006 |
| 2 | 615-624 | PRRARSVRYP | linker | 1-10 |
| 2 | 625-639 | RTCCLCDRRATCFST | 3′-to-5′_exonuclease(NC_045512: + : 18040-19620) | 205-219 |
| 2 | 640-649 | PRRARSVRYP | linker | 1-10 |
| 2 | 650-660 | IEELFYSYATH | 3′-to-5′_exonuclease(NC_045512: + : 18040-19620) | 363-373 |
| 2 | 661-670 | PRRARSVRYP | linker | 1-10 |
| 2 | 671-690 | KLTCATTRQVVNVVTTKIAL | nsp3(NC_045512: + : 2720-8554) | 1923-1942 |
| 2 | 691-700 | PRRARSVRYP | linker | 1-10 |
| 2 | 701-720 | FPQSAPHGVVFLHVTYVPAQ | surface_glycoprotein@Aruba(NC_045512@Aruba: + : 21563-25384) | 1048-1067 |
| 2 | 721-730 | PRRARSVRYP | linker | 1-10 |
| 2 | 731-738 | SVDCTMYI | surface_glycoprotein(NC_045512: + : 21563-25384) | 735-742 |
| 2 | 739-748 | PRRARSVRYP | linker | 1-10 |
| 2 | 749-760 | FRSSVLHSTRDL | surface_glycoprotein@Nigeria(NC_045512@Nigeria: + : 21563-25384) | 43-54 |
| 2 | 761-770 | PRRARSVRYP | linker | 1-10 |
| 2 | 771-778 | QIGVVREF | helicase(NC_045512: + : 16237-18039) | 492-499 |
| 2 | 779-788 | PRRARSVRYP | linker | 1-10 |
| 2 | 789-802 | EGVVDYGARFYFYT | nsp3(NC_045512: + : 2720-8554) | 595-608 |
| 2 | 803-812 | PRRARSVRYP | linker | 1-10 |
| 2 | 813-827 | SYELQTPFEIKLAKK | nsp2(NC_045512: + : 806-2719) | 68-82 |
| 2 | 828-837 | PRRARSVRYP | linker | 1-10 |
| 2 | 838-847 | GNCDVVIGIV | surface_glycoprotein(NC_045512: + : 21563-25384) | 1124-1133 |
| 2 | 848-857 | PRRARSVRYP | linker | 1-10 |
| 2 | 858-867 | AGAALQIPFA | surface_glycoprotein@Nigeria(NC_045512@Nigeria: + : 21563-25384) | 886-895 |
| 2 | 868-877 | PRRARSVRYP | linker | 1-10 |
| 2 | 878-892 | TYACWHHSIGFDYVY | 3′-to-5′_exonuclease(NC_045512: + : 18040-19620) | 223-237 |
| 2 | 893-902 | PRRARSVRYP | linker | 1-10 |
| 2 | 903-915 | ANFCALILAYCNK | nsp3(NC_045512: + : 2720-8554) | 890-902 |
| 2 | 916-925 | PRRARSVRYP | linker | 1-10 |
| 2 | 926-935 | QEHYVRITGL | helicase(NC_045512: + : 16237-18039) | 243-252 |
| 2 | 936-945 | PRRARSVRYP | linker | 1-10 |
| 2 | 946-960 | EFQFCNYPFLGVYHK | surface_glycoprotein@Norway(NC_045512@Norway: + : 21563-25384) | 129-143 |
| 2 | 961-970 | PRRARSVRYP | linker | 1-10 |
| 2 | 971-981 | HFPRKGVFVSN | surface_glycoprotein@SmallAsia(NC_045512@SmallAsia: + : 21563-25384) | 1078-1088 |
| 2 | 982-991 | PRRARSVRYP | linker | 1-10 |
| 2 | 992-1001 | VVADAVIKTL | nsp3(NC_045512: + : 2720-8554) | 56-65 |
| 2 | 1002-1011 | PRRARSVRYP | linker | 1-10 |
| 2 | 1012-1025 | GFNCYFPLQPYGFQ | surface_glycoprotein@SmallSouthAmerica(NC_045512@ | 481-494 |
| | | | SmallSouthAmerica: + : 21563-25384) | |
| 2 | 1026-1035 | PRRARSVRYP | linker | 1-10 |
| 2 | 1036-1043 | AEVQIDRL | surface_glycoprotein(NC_045512: + : 21563-25384) | 989-996 |
| 2 | 1044-1053 | PRRARSVRYP | linker | 1-10 |
| 2 | 1054-1062 | EVFAQVKQI | surface_glycoprotein(NC_045512: + : 21563-25384) | 780-788 |
| 2 | 1063-1072 | PRRARSVRYP | linker | 1-10 |
| 2 | 1073-1085 | YAKPFLNKVVSTT | nsp3(NC_045512: + : 2720-8554) | 1323-1335 |
| 2 | 1086-1095 | PRRARSVRYP | linker | 1-10 |
| 2 | 1096-1105 | VMCGGSLYVK | RNA-dependent_RNA_polymerase(NC_045512: + : 13442-13468 + 13468-16236) | 667-676 |
| 2 | 1106-1115 | PRRARSVRYP | linker | 1-10 |
| 2 | 1116-1123 | TDAVDCAL | surface_glycoprotein(NC_045512: + : 21563-25384) | 286-293 |
| 2 | 1124-1133 | PRRARSVRYP | linker | 1-10 |
| 2 | 1134-1153 | PINLVRGLPQGFSVLEPLVD | surface_glycoprotein@SmallAfrica(NC_045512@SmallAfrica: + : 21563-25384) | 209-228 |
| 2 | 1154-1163 | PRRARSVRYP | linker | 1-10 |
| 2 | 1164-1171 | STFKCYGV | surface_glycoprotein@Aruba(NC_045512@Aruba: + : 21563-25384) | 371-378 |
| 2 | 1172-1181 | PRRARSVRYP | linker | 1-10 |
| 2 | 1182-1200 | KLNVGDYFVLTSHTVMPLS | helicase(NC_045512: + : 16237-18039) | 218-236 |
| 3 | 1-10 | ETFVTHSKGL | nsp2(NC_045512: + : 806-2719) | 527-536 |
| 3 | 11-20 | PRRARSVRYP | linker | 1-10 |
| 3 | 21-29 | RSVYPVASP | nsp2(NC_045512: + : 806-2719) | 121-129 |
| 3 | 30-39 | PRRARSVRYP | linker | 1-10 |
| 3 | 40-62 | NHDLYCQVHGNAHVASCDAIMTR | 3′-to-5′_exonuclease(NC_045512: + : 18040-19620) | 256-278 |
| 3 | 63-72 | PRRARSVRYP | linker | 1-10 |
| 3 | 73-80 | MADLVYAL | RNA-dependent_RNA_polymerase(NC_045512: + : 13442-13468 + 13468-16236) | 124-131 |
| 3 | 81-90 | PRRARSVRYP | linker | 1-10 |
| 3 | 91-99 | TEIYQAGST | surface_glycoprotein@Aruba(NC_045512@Aruba: + : 21563-25384) | 466-474 |
| 3 | 100-109 | PRRARSVRYP | linker | 1-10 |
| 3 | 110-140 | YIWLGFIAGLIAIVMVTIMLCC | surface_glycoprotein@Aruba(NC_045512@Aruba: + : 21563-25384) | 1211-1241 |
| | | MTSCCSCLK | | |
| 3 | 141-150 | PRRARSVRYP | linker | 1-10 |
| 3 | 151-163 | FQTLLALHRSYLT | surface_glycoprotein@Aruba(NC_045512@Aruba: + : 21563-25384) | 234-246 |
| 3 | 164-173 | PRRARSVRYP | linker | 1-10 |
| 3 | 174-187 | TKDVVECLKLSHQS | nsp3(NC_045512: + : 2720-8554) | 1830-1843 |
| 3 | 188-197 | PRRARSVRYP | linker | 1-10 |
| 3 | 198-207 | DVVAIDYKHY | nsp3(NC_045512: + : 2720-8554) | 1148-1157 |
| 3 | 208-217 | PRRARSVRYP | linker | 1-10 |
| 3 | 218-225 | KLGASQRV | membrane_glycoprotein(NC_045512: + : 26523-27191) | 180-187 |
| 3 | 226-235 | PRRARSVRYP | linker | 1-10 |
| 3 | 236-243 | LPINVIVF | nsp3(NC_045512: + : 2720-8554) | 1718-1725 |
| 3 | 244-253 | PRRARSVRYP | linker | 1-10 |
| 3 | 254-262 | TENLLLYID | nsp3(NC_045512: + : 2720-8554) | 432-440 |
| 3 | 263-272 | PRRARSVRYP | linker | 1-10 |
| 3 | 273-284 | VPVVDSYYSLLM | RNA-dependent_RNA_polymerase(NC_045512: + : 13442-13468 + 13468-16236) | 231-242 |
| 3 | 285-294 | PRRARSVRYP | linker | 1-10 |
| 3 | 295-307 | KASCTLSEQLDFI | nsp2(NC_045512: + : 806-2719) | 30-42 |
| 3 | 308-317 | PRRARSVRYP | linker | 1-10 |
| 3 | 318-329 | VTMPLGYVTHGL | nsp3(NC_045512: + : 2720-8554) | 628-639 |
| 3 | 330-339 | PRRARSVRYP | linker | 1-10 |
| 3 | 340-349 | NEFYAYLRKH | RNA-dependent_RNA_polymerase(NC_045512: + : 13442-13468 + 13468-16236) | 743-752 |
| 3 | 350-359 | PRRARSVRYP | linker | 1-10 |
| 3 | 360-379 | RAKHYVYIGDPAQLPAPRTL | helicase(NC_045512: + : 16237-18039) | 392-411 |
| 3 | 380-389 | PRRARSVRYP | linker | 1-10 |
| 3 | 390-428 | GCDVTDVTQLYLGGMSYYC | helicase(NC_045512: + : 16237-18039) | 54-92 |
| | | KSHKPPISFPLCANGQVFGL | | |
| 3 | 429-438 | PRRARSVRYP | linker | 1-10 |
| 3 | 439-446 | KAVFISPY | helicase(NC_045512: + : 16237-18039) | 508-515 |
| 3 | 447-456 | PRRARSVRYP | linker | 1-10 |
| 3 | 457-474 | LNDLCFTNVYADSFVIRG | surface_glycoprotein(NC_045512: + : 21563-25384) | 387-404 |
| 3 | 475-484 | PRRARSVRYP | linker | 1-10 |
| 3 | 485-504 | MTSCCSCLKGCCSCGSCCKF | surface_glycoprotein(NC_045512: + : 21563-25384) | 1237-1256 |
| 3 | 505-514 | PRRARSVRYP | linker | 1-10 |
| 3 | 515-537 | LIAIVMVTIMLCCITSCCSCLKG | surface_glycoprotein@Mozambique(NC_045512@Mozambique: + : 21563-25384) | 1220-1242 |
| 3 | 538-547 | PRRARSVRYP | linker | 1-10 |
| 3 | 548-559 | AKLLHKPIVWHV | nsp3(NC_045512: + : 2720-8554) | 1165-1176 |
| 3 | 560-569 | PRRARSVRYP | linker | 1-10 |
| 3 | 570-577 | YDPLQPEL | surface_glycoprotein(NC_045512: + : 21563-25384) | 1138-1145 |
| 3 | 578-587 | PRRARSVRYP | linker | 1-10 |
| 3 | 588-599 | FNCYFPLQSYGF | surface_glycoprotein(NC_045512: + : 21563-25384) | 486-497 |
| 3 | 600-609 | PRRARSVRYP | linker | 1-10 |
| 3 | 610-626 | LECNVKTTEVVGDIILK | nsp3(NC_045512: + : 2720-8554) | 1244-1260 |
| 3 | 627-636 | PRRARSVRYP | linker | 1-10 |
| 3 | 637-651 | FKELLVYAADPAMHA | RNA-dependent_RNA_polymerase(NC_045512: + : 13442-13468 + 13468-16236) | 368-382 |
| 3 | 652-661 | PRRARSVRYP | linker | 1-10 |
| 3 | 662-671 | SVELKHFFFA | RNA-dependent_RNA_polymerase(NC_045512: + : 13442-13468 + 13468-16236) | 434-443 |
| 3 | 672-681 | PRRARSVRYP | linker | 1-10 |
| 3 | 682-700 | DKSAFVNLKQLPFFYYSDS | 3′-to-5′_exonuclease(NC_045512: + : 18040-19620) | 432-450 |
| 3 | 701-710 | PRRARSVRYP | linker | 1-10 |
| 3 | 711-720 | ARDLICAQKF | surface_glycoprotein(NC_045512: + : 21563-25384) | 846-855 |
| 3 | 721-730 | PRRARSVRYP | linker | 1-10 |
| 3 | 731-745 | INAACRKVQHMVVKA | 3′-to-5′_exonuclease(NC_045512: + : 18040-19620) | 305-319 |
| 3 | 746-755 | PRRARSVRYP | linker | 1-10 |
| 3 | 756-768 | ATNVVIKVCEFQF | surface_glycoprotein(NC_045512: + : 21563-25384) | 123-135 |
| 3 | 769-778 | PRRARSVRYP | linker | 1-10 |
| 3 | 779-787 | AAAYYVGYL | surface_glycoprotein(NC_045512: + : 21563-25384) | 262-270 |
| 3 | 788-797 | PRRARSVRYP | linker | 1-10 |
| 3 | 798-809 | SSPDAVTAYNGY | nsp3(NC_045512: + : 2720-8554) | 660-671 |
| 3 | 810-819 | PRRARSVRYP | linker | 1-10 |
| 3 | 820-833 | GFNCYSPLQSYGFQ | surface_glycoprotein@Peru(NC_045512@Peru: + : 21563-25384) | 485-498 |
| 3 | 834-843 | PRRARSVRYP | linker | 1-10 |
| 3 | 844-854 | FFSNVTWFHVS | surface_glycoprotein@Nigeria(NC_045512@Nigeria: + : 21563-25384) | 58-68 |
| 3 | 855-864 | PRRARSVRYP | linker | 1-10 |
| 3 | 865-880 | TVLKKCKSAFYILPSI | nsp3(NC_045512: + : 2720-8554) | 526-541 |
| 3 | 881-890 | PRRARSVRYP | linker | 1-10 |
| 3 | 891-900 | RHSLSHFVNL | nsp3(NC_045512: + : 2720-8554) | 1697-1706 |
| 3 | 901-910 | PRRARSVRYP | linker | 1-10 |
| 3 | 911-918 | CLNRVCTN | nsp3(NC_045512: + : 2720-8554) | 1342-1349 |
| 3 | 919-928 | PRRARSVRYP | linker | 1-10 |
| 3 | 929-942 | FFSNVTWFHAIHVS | surface_glycoprotein@Bangladesh(NC_045512@Bangladesh: + : 21563-25384) | 58-71 |
| 3 | 943-952 | PRRARSVRYP | linker | 1-10 |
| 3 | 953-966 | FGTVYEKLKPVLDW | nsp2(NC_045512: + : 806-2719) | 437-450 |
| 3 | 967-976 | PRRARSVRYP | linker | 1-10 |
| 3 | 977-991 | TYGVGYQPYRVVVLS | surface_glycoprotein@Australia(NC_045512@Australia: + : 21563-25384) | 496-510 |
| 3 | 992-1001 | PRRARSVRYP | linker | 1-10 |
| 3 | 1002-1009 | FKLASHMY | nsp3(NC_045512: + : 2720-8554) | 96-103 |
| 3 | 1010-1019 | PRRARSVRYP | linker | 1-10 |
| 3 | 1020-1027 | ISNCVADY | surface_glycoprotein(NC_045512: + : 21563-25384) | 358-365 |
| 3 | 1028-1037 | PRRARSVRYP | linker | 1-10 |
| 3 | 1038-1045 | DSYFVVKR | RNA-dependent_RNA_polymerase(NC_045512: + : 13442-13468 + 13468-16236) | 67-74 |
| 3 | 1046-1055 | PRRARSVRYP | linker | 1-10 |
| 3 | 1056-1068 | AIKCVPQADVEWK | 3′-to-5′_exonuclease(NC_045512: + : 18040-19620) | 337-349 |
| 3 | 1069-1078 | PRRARSVRYP | linker | 1-10 |
| 3 | 1079-1088 | TQNVLYENQK | surface_glycoprotein(NC_045512: + : 21563-25384) | 912-921 |
| 3 | 1089-1098 | PRRARSVRYP | linker | 1-10 |
| 3 | 1099-1114 | FSNVTWFHAIHVSGTN | surface_glycoprotein@Peru(NC_045512@Peru: + : 21563-25384) | 59-74 |
| 3 | 1115-1124 | PRRARSVRYP | linker | 1-10 |
| 3 | 1125-1136 | ISVTTEILPVSM | surface_glycoprotein(NC_045512: + : 21563-25384) | 720-731 |
| 3 | 1137-1146 | PRRARSVRYP | linker | 1-10 |
| 3 | 1147-1156 | KQYGDCLGDI | surface_glycoprotein(NC_045512: + : 21563-25384) | 835-844 |
| 3 | 1157-1166 | PRRARSVRYP | linker | 1-10 |
| 3 | 1167-1174 | FTGCVIAW | surface_glycoprotein(NC_045512: + : 21563-25384) | 429-436 |
| 3 | 1175-1184 | PRRARSVRYP | linker | 1-10 |
| 3 | 1185-1194 | SSVLHSTQDF | surface_glycoprotein@Norway(NC_045512@Norway: + : 21563-25384) | 45-54 |
| 3 | 1195-1204 | PRRARSVRYP | linker | 1-10 |
| 3 | 1205-1212 | SLIDLQEL | surface_glycoprotein(NC_045512: + : 21563-25384) | 1196-1203 |
| 4 | 1-10 | ACIDCSARHI | nsp3(NC_045512: + : 2720-8554) | 1872-1881 |
| 4 | 11-20 | PRRARSVRYP | linker | 1-10 |
| 4 | 21-42 | INLVRDLPQGFSALEPLVDLPI | surface_glycoprotein@Aruba(NC_045512@Aruba: + : 21563-25384) | 206-227 |
| 4 | 43-52 | PRRARSVRYP | linker | 1-10 |
| 4 | 53-66 | RNLQHRLYECLYRN | RNA-dependent_RNA_polymerase(NC_045512: + : 13442-13468 + 13468-16236) | 721-734 |
| 4 | 67-76 | PRRARSVRYP | linker | 1-10 |
| 4 | 77-89 | GVNLVAVPTGYVD | 3′-to-5′_exonuclease(NC_045512: + : 18040-19620) | 114-126 |
| 4 | 90-99 | PRRARSVRYP | linker | 1-10 |
| 4 | 100-113 | TSGVGYQPYRVVVL | surface_glycoprotein@Aruba(NC_045512@Aruba: + : 21563-25384) | 496-509 |
| 4 | 114-123 | PRRARSVRYP | linker | 1-10 |
| 4 | 124-174 | HFAIGLALYYPSARIVYTACSHAAVD | helicase(NC_045512: + : 16237-18039) | 290-340 |
| | | ALCEKALKYLPIDKCSRIIPARARV | | |
| 4 | 175-184 | PRRARSVRYP | linker | 1-10 |
| 4 | 185-204 | YVYLPYPDPSRILGAGCFVD | RNA-dependent_RNA_polymerase(NC_045512: + : 13442-13468 + 13468-16236) | 826-845 |
| 4 | 205-214 | PRRARSVRYP | linker | 1-10 |
| 4 | 215-225 | KGVQIPCTCGK | nsp3(NC_045512: + : 2720-8554) | 963-973 |
| 4 | 226-235 | PRRARSVRYP | linker | 1-10 |
| 4 | 236-255 | DDRCILHCANFNVLFSTVFP | RNA-dependent_RNA_polymerase(NC_045512: + : 13442-13468 + 13468-16236) | 303-322 |
| 4 | 256-265 | PRRARSVRYP | linker | 1-10 |
| 4 | 266-278 | IVKFISTCACEIV | nsp2(NC_045512: + : 806-2719) | 468-480 |
| 4 | 279-288 | PRRARSVRYP | linker | 1-10 |
| 4 | 289-296 | NNLVVMAY | nsp2(NC_045512: + : 806-2719) | 413-420 |
| 4 | 297-306 | PRRARSVRYP | linker | 1-10 |
| 4 | 307-314 | RVEAFEYY | nsp3(NC_045512: + : 2720-8554) | 810-817 |
| 4 | 315-324 | PRRARSVRYP | linker | 1-10 |
| 4 | 325-339 | FSVAALTNNVAFQTV | RNA-dependent_RNA_polymerase(NC_045512: + : 13442-13468 + 13468-16236) | 396-410 |
| 4 | 340-349 | PRRARSVRYP | linker | 1-10 |
| 4 | 350-359 | FEYVSQPFLM | surface_glycoprotein@Aruba(NC_045512@Aruba: + : 21563-25384) | 164-173 |
| 4 | 360-369 | PRRARSVRYP | linker | 1-10 |
| 4 | 370-378 | EPLLKGVKL | surface_glycoprotein@Croatia(NC_045512@Croatia: + : 21563-25384) | 1258-1266 |
| 4 | 379-388 | PRRARSVRYP | linker | 1-10 |
| 4 | 389-398 | GVITHDVSSA | helicase(NC_045512: + : 16237-18039) | 478-487 |
| 4 | 399-408 | PRRARSVRYP | linker | 1-10 |
| 4 | 409-431 | TIATYCTGSIPCSVCLSGLDSLD | nsp3(NC_045512: + : 2720-8554) | 1459-1481 |
| 4 | 432-441 | PRRARSVRYP | linker | 1-10 |
| 4 | 442-455 | IKVCEFQFCNDPYY | surface_glycoprotein@CostaRica(NC_045512@CostaRica: + : 21563-25384) | 128-141 |
| 4 | 456-465 | PRRARSVRYP | linker | 1-10 |
| 4 | 466-482 | CSNLLLQYGSFCTQLNR | surface_glycoprotein(NC_045512: + : 21563-25384) | 749-765 |
| 4 | 483-492 | PRRARSVRYP | linker | 1-10 |
| 4 | 493-502 | DPIHSLRVCV | nsp3(NC_045512: + : 2720-8554) | 339-348 |
| 4 | 503-512 | PRRARSVRYP | linker | 1-10 |
| 4 | 513-527 | TISVTTEILPVSMAK | surface_glycoprotein@Mexico(NC_045512@Mexico: + : 21563-25384) | 719-733 |
| 4 | 528-537 | PRRARSVRYP | linker | 1-10 |
| 4 | 538-549 | TRAKVGILCIMS | helicase(NC_045512: + : 16237-18039) | 566-577 |
| 4 | 550-559 | PRRARSVRYP | linker | 1-10 |
| 4 | 560-572 | ISSVLNDILSRLD | surface_glycoprotein@Bangladesh(NC_045512@Bangladesh: + : 21563-25384) | 972-984 |
| 4 | 573-582 | PRRARSVRYP | linker | 1-10 |
| 4 | 583-602 | SEAVEAPLVGTPVCINGLML | nsp2(NC_045512: + : 806-2719) | 591-610 |
| 4 | 603-612 | PRRARSVRYP | linker | 1-10 |
| 4 | 613-621 | MPVCVETKA | nsp3(NC_045512: + : 2720-8554) | 571-579 |
| 4 | 622-631 | PRRARSVRYP | linker | 1-10 |
| 4 | 632-640 | VFSQCVNLT | surface_glycoprotein@Egypt(NC_045512@Egypt: + : 21563-25384) | 11-19 |
| 4 | 641-650 | PRRARSVRYP | linker | 1-10 |
| 4 | 651-672 | GYQPYRVVVLSFELLHAPATVC | surface_glycoprotein(NC_045512: + : 21563-25384) | 504-525 |
| 4 | 673-682 | PRRARSVRYP | linker | 1-10 |
| 4 | 683-693 | DNVLSTFISAA | nsp3(NC_045512: + : 2720-8554) | 1809-1819 |
| 4 | 694-703 | PRRARSVRYP | linker | 1-10 |
| 4 | 704-712 | VTANVNALL | RNA-dependent_RNA_polymerase(NC_045512: + : 13442-13468 + 13468-16236) | 700-708 |
| 4 | 713-722 | PRRARSVRYP | linker | 1-10 |
| 4 | 723-734 | VRTNVYLAVFDK | nsp3(NC_045512: + : 2720-8554) | 351-362 |
| 4 | 735-744 | PRRARSVRYP | linker | 1-10 |
| 4 | 745-763 | AIPINFTISVTTEILPVSM | surface_glycoprotein@Aruba(NC_045512@Aruba: + : 21563-25384) | 709-727 |
| 4 | 764-773 | PRRARSVRYP | linker | 1-10 |
| 4 | 774-783 | GTNLPLQLGF | 3′-to-5′_exonuclease(NC_045512: + : 18040-19620) | 102-111 |
| 4 | 784-793 | PRRARSVRYP | linker | 1-10 |
| 4 | 794-802 | YDLSVVNAR | helicase(NC_045512: + : 16237-18039) | 382-390 |
| 4 | 803-812 | PRRARSVRYP | linker | 1-10 |
| 4 | 813-831 | LEILDITPCSFGGVSVITP | surface_glycoprotein(NC_045512: + : 21563-25384) | 582-600 |
| 4 | 832-841 | PRRARSVRYP | linker | 1-10 |
| 4 | 842-861 | GYLPQNAVVKIYCPACHNSE | nsp2(NC_045512: + : 806-2719) | 178-197 |
| 4 | 862-871 | PRRARSVRYP | linker | 1-10 |
| 4 | 872-887 | FLVLLPLVSIQCVNLT | surface_glycoprotein@SmallNorthAmerica(NC_045512@ | 4-19 |
| | | | SmallNorthAmerica: + : 21563-25384) | |
| 4 | 888-897 | PRRARSVRYP | linker | 1-10 |
| 4 | 898-909 | FQTLLHRSYLTP | surface_glycoprotein@SmallAsia(NC_045512@SmallAsia: + : 21563-25384) | 230-241 |
| 4 | 910-919 | PRRARSVRYP | linker | 1-10 |
| 4 | 920-939 | FCKLHNWNCVNCDTFCAGST | nsp3(NC_045512: + : 2720-8554) | 1626-1645 |
| 4 | 940-949 | PRRARSVRYP | linker | 1-10 |
| 4 | 950-965 | LQSLQTYVTQQLIRAA | surface_glycoprotein(NC_045512: + : 21563-25384) | 100 1-1016 |
| 4 | 966-975 | PRRARSVRYP | linker | 1-10 |
| 4 | 976-989 | SYLFQHANLDSCKR | nsp3(NC_045512: + : 2720-8554) | 915-928 |
| 4 | 990-999 | PRRARSVRYP | linker | 1-10 |
| 4 | 1000-1011 | HEFCSQHTMLVK | RNA-dependent_RNA_polymerase(NC_045512: + : 13442-13468 + 13468-16236) | 810-821 |
| 4 | 1012-1021 | PRRARSVRYP | linker | 1-10 |
| 4 | 1022-1046 | SDIDITFLKKDAPYIVGDVVQEGVL | nsp3(NC_045512: + : 2720-8554) | 454-478 |
| 4 | 1047-1056 | PRRARSVRYP | linker | 1-10 |
| 4 | 1057-1072 | VREVLSDRELHLSWEV | helicase(NC_045512: + : 16237-18039) | 154-169 |
| 4 | 1073-1082 | PRRARSVRYP | linker | 1-10 |
| 4 | 1083-1106 | PINLVRDLPQGFSVLEPLVDLPIG | surface_glycoprotein@Belgium(NC_045512@Belgium: + : 21563-25384) | 205-228 |
| 4 | 1107-1116 | PRRARSVRYP | linker | 1-10 |
| 4 | 1117-1126 | VTGLFKDCSK | 3′-to-5′_exonuclease(NC_045512: + : 18040-19620) | 4-13 |
| 4 | 1127-1136 | PRRARSVRYP | linker | 1-10 |
| 4 | 1137-1144 | ARDLSLQF | nsp3(NC_045512: + : 2720-8554) | 1652-1659 |
| 4 | 1145-1154 | PRRARSVRYP | linker | 1-10 |
| 4 | 1155-1175 | AVLYQGVNCTEVPFAIHADQL | surface_glycoprotein@SmallAfrica(NC_045512@SmallAfrica: + : 21563-25384) | 605-625 |
| 4 | 1176-1185 | PRRARSVRYP | linker | 1-10 |
| 4 | 1186-1203 | IKVCEFQFCNDPFLGVYH | surface_glycoprotein@Aruba(NC_045512@Aruba: + : 21563-25384) | 125-142 |

[0097] In certain embodiments, the vaccine comprises or expresses at least one of the concatemers of epitopes with intervening linker sequences (and as set forth in FIG. 22). In certain embodiments, the vaccine comprises or expresses at least two of the concatemers set forth below. In certain embodiments, the vaccine comprises or expresses three of the concatemers set forth below. In certain embodiments, the vaccine comprises or expresses all the concatemers set forth below.

Table 12

| | pos_in_ | | | pos_in_ |
|---|---|---|---|---|
| contig | contig | epitope | gene | gene |
| 1 | 1-11 | YDKLQFISLEI | helicase@SouthAfrica(NC_045512@SouthAfrica: + : 16237-18039) | 582-592 |
| 1 | 12-21 | PRRARSVRYP | linker | 1-10 |
| 1 | 22-39 | YNLLKDCPAVAKHDFFKF | RNA-dependent_RNA_polymerase@Aruba(NC_045512@Aruba: + : 13442-13468 + 13468-16236) | 87-104 |
| 1 | 40-49 | PRRARSVRYP | linker | 1-10 |
| 1 | 50-63 | SDRVVFVLWAHGFE | 3′-to-5′_exonuclease(NC_045512: + : 18040-19620) | 178-191 |
| 1 | 64-73 | PRRARSVRYP | linker | 1-10 |
| 1 | 74-82 | TENLLLYID | nsp3(NC_045512: + : 2720-8554) | 432-440 |
| 1 | 83-92 | PRRARSVRYP | linker | 1-10 |
| 1 | 93-111 | ANSVFNICQSVTANVNALL | RNA-dependent_RNA_polymerase@Croatia(NC_045512@ | 690-708 |
| | | | Croatia: + : 13442-13468 + 13468-16236) | |
| 1 | 112-121 | PRRARSVRYP | linker | 1-10 |
| 1 | 122-130 | AGFSLWVYK | 3′-to-5′_exonuclease(NC_045512: + : 18040-19620) | 504-512 |
| 1 | 131-140 | PRRARSVRYP | linker | 1-10 |
| 1 | 141-148 | DQDVLFAY | RNA-dependent_RNA_polymerase@FrenchGuiana(NC_045512@ | 523-530 |
| | | | FrenchGuiana: + : 13442-13468 + 13468-16236) | |
| 1 | 149-158 | PRRARSVRYP | linker | 1-10 |
| 1 | 159-168 | ETFVTHSKGL | nsp2(NC_045512: + : 806-2719) | 527-536 |
| 1 | 169-178 | PRRARSVRYP | linker | 1-10 |
| 1 | 179-186 | SDDAVVCF | RNA-dependent_RNA_polymerase@Aruba(NC_045512@Aruba: + : 13442-13468 + 13468-16236) | 759-766 |
| 1 | 187-196 | PRRARSVRYP | linker | 1-10 |
| 1 | 197-208 | AKLLHKPIVWHV | nsp3(NC_045512: + : 2720-8554) | 1165-1176 |
| 1 | 209-218 | PRRARSVRYP | linker | 1-10 |
| 1 | 219-226 | FNSVCRFM | helicase@Malaysia(NC_045512@Malaysia: + : 16237-18039) | 422-429 |
| 1 | 227-236 | PRRARSVRYP | linker | 1-10 |
| 1 | 237-247 | YELKHGTFTCA | nsp3(NC_045512: + : 2720-8554) | 996-1006 |
| 1 | 248-257 | PRRARSVRYP | linker | 1-10 |
| 1 | 258-267 | DVVAIDYKHY | nsp3(NC_045512: + : 2720-8554) | 1148-1157 |
| 1 | 268-277 | PRRARSVRYP | linker | 1-10 |
| 1 | 278-285 | KAVFISPY | helicase(NC_045512: + : 16237-18039) | 508-515 |
| 1 | 286-295 | PRRARSVRYP | linker | 1-10 |
| 1 | 296-303 | ARDLSLQF | nsp3(NC_045512: + : 2720-8554) | 1652-1659 |
| 1 | 304-313 | PRRARSVRYP | linker | 1-10 |
| 1 | 314-331 | IKDLPKEITVATSRTLSY | membrane_glycoprotein(NC_045512: + : 26523-27191) | 161-178 |
| 1 | 332-341 | PRRARSVRYP | linker | 1-10 |
| 1 | 342-355 | TCFSVAALTNNVAF | RNA-dependent_RNA_polymerase@Aruba(NC_045512@Aruba: + : 13442-13468 + 13468-16236) | 394-407 |
| 1 | 356-365 | PRRARSVRYP | linker | 1-10 |
| 1 | 366-381 | SRIIPARARVDCFDKF | helicase@Brazil(NC_045512@Brazil: + : 16237-18039) | 331-346 |
| 1 | 382-391 | PRRARSVRYP | linker | 1-10 |
| 1 | 392-406 | SYELQTPFEIKLAKK | nsp2(NC_045512: + : 806-2719) | 68-82 |
| 1 | 407-416 | PRRARSVRYP | linker | 1-10 |
| 1 | 417-437 | KLSYGIAIVREVLSDRELHLS | helicase@Colombia(NC_045512@Colombia: + : 16237-18039) | 146-166 |
| 1 | 438-447 | PRRARSVRYP | linker | 1-10 |
| 1 | 448-469 | INLVRDLPQGFSALEPLVDLPI | surface_glycoprotein@Aruba(NC_045512@Aruba: + : 21563-25384) | 206-227 |
| 1 | 470-479 | PRRARSVRYP | linker | 1-10 |
| 1 | 480-493 | LKEILVTYNCCDDD | RNA-dependent_RNA_polymerase(NC_045512: + : 13442-13468 + 13468-16236) | 142-155 |
| 1 | 494-503 | PRRARSVRYP | linker | 1-10 |
| 1 | 504-519 | VREVLSDRELHLSWEV | helicase(NC_045512: + : 16237-18039) | 154-169 |
| 1 | 520-529 | PRRARSVRYP | linker | 1-10 |
| 1 | 530-539 | QEHYVRITGL | helicase(NC_045512: + : 16237-18039) | 243-252 |
| 1 | 540-549 | PRRARSVRYP | linker | 1-10 |
| 1 | 550-559 | RHSLSHFVNL | nsp3(NC_045512: + : 2720-8554) | 1697-1706 |
| 1 | 560-569 | PRRARSVRYP | linker | 1-10 |
| 1 | 570-577 | MADLVYAL | RNA-dependent_RNA_polymerase(NC_045512: + : 13442-13468 + 13468-16236) | 124-131 |
| 1 | 578-587 | PRRARSVRYP | linker | 1-10 |
| 1 | 588-595 | PEHSLAEY | nsp2(NC_045512: + : 806-2719) | 200-207 |
| 1 | 596-605 | PRRARSVRYP | linker | 1-10 |
| 1 | 606-621 | FRELGVVHNQDVNLHS | RNA-dependent_RNA_polymerase(NC_045512: + : 13442-13468 + 13468-16236) | 348-363 |
| 1 | 622-631 | PRRARSVRYP | linker | 1-10 |
| 1 | 632-642 | LRIAGHHLGRC | membrane_glycoprotein(NC_045512: + : 26523-27191) | 149-159 |
| 1 | 643-652 | PRRARSVRYP | linker | 1-10 |
| 1 | 653-672 | FCKLHNWNCVNCDTFCAGST | nsp3(NC_045512: + : 2720-8554) | 1626-1645 |
| 1 | 673-682 | PRRARSVRYP | linker | 1-10 |
| 1 | 683-690 | CLNRVCTN | nsp3(NC_045512: + : 2720-8554) | 1342-1349 |
| 1 | 691-700 | PRRARSVRYP | linker | 1-10 |
| 1 | 701-720 | FPQSAPHGVVFLHVTYVPAQ | surface_glycoprotein@Aruba(NC_045512@Aruba: + : 21563-25384) | 1048-1067 |
| 1 | 721-730 | PRRARSVRYP | linker | 1-10 |
| 1 | 731-749 | ANSVFNICQAVTANVNALL | RNA-dependent_RNA_polymerase@Aruba(NC_045512@Aruba: + : 13442-13468 + 13468-16236) | 690-708 |
| 1 | 750-759 | PRRARSVRYP | linker | 1-10 |
| 1 | 760-776 | PNFVFPLNSIIKTIQPR | nsp2(NC_045512: + : 806-2719) | 91-107 |
| 1 | 777-786 | PRRARSVRYP | linker | 1-10 |
| 1 | 787-799 | RSVASQSIIAYTM | surface_glycoprotein@Aruba(NC_045512@Aruba: + : 21563-25384) | 681-693 |
| 1 | 800-809 | PRRARSVRYP | linker | 1-10 |
| 1 | 810-817 | REGVFVSN | surface_glycoprotein@Aruba(NC_045512@Aruba: + : 21563-25384) | 1087-1094 |
| 1 | 818-827 | PRRARSVRYP | linker | 1-10 |
| 1 | 828-840 | AFASEAARVVRSI | nsp2(NC_045512: + : 806-2719) | 355-367 |
| 1 | 841-850 | PRRARSVRYP | linker | 1-10 |
| 1 | 851-863 | ISSVLNDILSRLD | surface_glycoprotein@Bangladesh(NC_045512@Bangladesh: + : 21563-25384) | 972-984 |
| 1 | 864-873 | PRRARSVRYP | linker | 1-10 |
| 1 | 874-887 | LVLLPLVSSQCVNF | surface_glycoprotein@Brazil(NC_045512@Brazil: + : 21563-25384) | 5-18 |
| 1 | 888-897 | PRRARSVRYP | linker | 1-10 |
| 1 | 898-912 | EFQFCNDPFLGVYYH | surface_glycoprotein@Chile(NC_045512@Chile: + : 21563-25384) | 132-146 |
| 1 | 913-922 | PRRARSVRYP | linker | 1-10 |
| 1 | 923-931 | AAAYYVGYL | surface_glycoprotein(NC_045512: + : 21563-25384) | 262-270 |
| 1 | 932-941 | PRRARSVRYP | linker | 1-10 |
| 1 | 942-950 | VFSQCVNLT | surface_glycoprotein@Egypt(NC_045512@Egypt: + : 21563-25384) | 11-19 |
| 1 | 951-960 | PRRARSVRYP | linker | 1-10 |
| 1 | 961-973 | LLNVPLHGTILTR | membrane_glycoprotein(NC_045512: + : 26523-27191) | 119-131 |
| 1 | 974-983 | PRRARSVRYP | linker | 1-10 |
| 1 | 984-996 | NPVLPFNDGVYFA | surface_glycoprotein(NC_045512: + : 21563-25384) | 81-93 |
| 1 | 997-1006 | PRRARSVRYP | linker | 1-10 |
| 1 | 1007-1014 | SLIDLQEL | surface_glycoprotein(NC_045512: + : 21563-25384) | 1196-1203 |
| 1 | 1015-1024 | PRRARSVRYP | linker | 1-10 |
| 1 | 1025-1032 | YDPLQPEL | surface_glycoprotein(NC_045512: + : 21563-25384) | 1138-1145 |
| 1 | 1033-1042 | PRRARSVRYP | linker | 1-10 |
| 1 | 1043-1058 | FLVLLPLVSSQCVNLT | surface_glycoprotein@Aruba(NC_045512@Aruba: + : 21563-25384) | 4-19 |
| 1 | 1059-1068 | PRRARSVRYP | linker | 1-10 |
| 1 | 1069-1076 | SSNVANYQ | helicase@Austria(NC_045512@Austria: + : 16237-18039) | 263-270 |
| 1 | 1077-1086 | PRRARSVRYP | linker | 1-10 |
| 1 | 1087-1101 | TYGVGYQPYRVVVLS | surface_glycoprotein@Australia(NC_045512@Australia: + : 21563-25384) | 496-510 |
| 1 | 1102-1111 | PRRARSVRYP | linker | 1-10 |
| 1 | 1112-1121 | TQNVLYENQK | surface_glycoprotein(NC_045512: + : 21563-25384) | 912-921 |
| 1 | 1122-1131 | PRRARSVRYP | linker | 1-10 |
| 1 | 1132-1139 | TDAVDCAL | surface_glycoprotein(NC_045512: + : 21563-25384) | 286-293 |
| 1 | 1140-1149 | PRRARSVRYP | linker | 1-10 |
| 1 | 1150-1165 | DKYVRNLQHRLYECLY | RNA-dependent_RNA_polymerase@Aruba(NC_045512@Aruba: + : 13442-13468 + 13468-16236) | 717-732 |
| 1 | 1166-1175 | PRRARSVRYP | linker | 1-10 |
| 1 | 1176-1191 | FLVLLPLVSIQCVNLT | surface_glycoprotein@SmallNorthAmerica(NC_045512@SmallNorthAmerica: + : 21563-25384) | 4-19 |
| 1 | 1192-1201 | PRRARSVRYP | linker | 1-10 |
| 1 | 1202-1219 | LFVVEVVDKYFDCYDGGC | RNA-dependent_RNA_polymerase(NC_045512: + : 13442-13468 + 13468-16236) | 470-487 |
| 1 | 1220-1229 | PRRARSVRYP | linker | 1-10 |
| 1 | 1230-1241 | HEFCSQHTMLVK | RNA-dependent_RNA_polymerase(NC_045512: + : 13442-13468 + 13468-16236) | 810-821 |
| 1 | 1242-1251 | PRRARSVRYP | linker | 1-10 |
| 1 | 1252-1259 | AALQIPFA | surface_glycoprotein(NC_045512: + : 21563-25384) | 892-899 |
| 1 | 1260-1269 | PRRARSVRYP | linker | 1-10 |
| 1 | 1270-1277 | SVDCTMYI | surface_glycoprotein(NC_045512: + : 21563-25384) | 735-742 |
| 1 | 1278-1287 | PRRARSVRYP | linker | 1-10 |
| 1 | 1288-1295 | NNLVVMAY | nsp2(NC_045512: + : 806-2719) | 413-420 |
| 1 | 1296-1305 | PRRARSVRYP | linker | 1-10 |
| 1 | 1306-1317 | FRSSVLHSTRDL | surface_glycoprotein@Nigeria(NC_045512@Nigeria: + : 21563-25384) | 43-54 |
| 1 | 1318-1327 | PRRARSVRYP | linker | 1-10 |
| 1 | 1328-1335 | ISNCVADY | surface_glycoprotein(NC_045512: + : 21563-25384) | 358-365 |
| 1 | 1336-1345 | PRRARSVRYP | linker | 1-10 |
| 1 | 1346-1365 | GYLPQNAVVKIYCPACHNSE | nsp2(NC_045512: + : 806-2719) | 178-197 |
| 1 | 1366-1375 | PRRARSVRYP | linker | 1-10 |
| 1 | 1376-1385 | VTGLFKDCSK | 3′-to-5′_exonuclease(NC_045512: + : 18040-19620) | 4-13 |
| 1 | 1386-1395 | PRRARSVRYP | linker | 1-10 |
| 1 | 1396-1403 | AEVQIDRL | surface_glycoprotein(NC_045512: + : 21563-25384) | 989-996 |
| 1 | 1404-1413 | PRRARSVRYP | linker | 1-10 |
| 1 | 1414-1427 | SVASQSIIAYTMSL | surface_glycoprotein@Austria(NC_045512@Austria: + : 21563-25384) | 678-691 |
| 1 | 1428-1437 | PRRARSVRYP | linker | 1-10 |
| 1 | 1438-1446 | EVFAQVKQI | surface_glycoprotein(NC_045512: + : 21563-25384) | 780-788 |
| 1 | 1447-1456 | PRRARSVRYP | linker | 1-10 |
| 1 | 1457-1475 | LEILDITPCSFGGVSVITP | surface_glycoprotein(NC_045512: + : 21563-25384) | 582-600 |
| 1 | 1476-1485 | PRRARSVRYP | linker | 1-10 |
| 1 | 1486-1496 | FFSNVTWFHVS | surface_glycoprotein@Nigeria(NC_045512@Nigeria: + : 21563-25384) | 58-68 |
| 1 | 1497-1506 | PRRARSVRYP | linker | 1-10 |
| 1 | 1507-1519 | FQTLLALHRSYLT | surface_glycoprotein@Aruba(NC_045512@Aruba: + : 21563-25384) | 234-246 |
| 2 | 1-20 | IRRPFLCCKCCYDHVISTSH | helicase(NC_045512: + : 16237-18039) | 20-39 |
| 2 | 21-30 | PRRARSVRYP | linker | 1-10 |
| 2 | 31-38 | LPINVIVF | nsp3(NC_045512: + : 2720-8554) | 1718-1725 |
| 2 | 39-48 | PRRARSVRYP | linker | 1-10 |
| 2 | 49-69 | HPNCVNCSDDRCILHCANFNV | RNA- dependent_RNA_polymerase@Aruba(NC_045512@Aruba: + : 13442-13468 + 13468-16236) | 295-315 |
| 2 | 70-79 | PRRARSVRYP | linker | 1-10 |
| 2 | 80-92 | GVNLVAVPTGYVD | 3′-to-5′_exonuclease(NC_045512: + : 18040-19620) | 114-126 |
| 2 | 93-102 | PRRARSVRYP | linker | 1-10 |
| 2 | 103-116 | IRNLQHRLYECLYR | RNA-dependent_RNA_polymerase@Austria(NC_045512@Austria: + : 13442-13468 + 13468-16236) | 720-733 |
| 2 | 117-126 | PRRARSVRYP | linker | 1-10 |
| 2 | 127-143 | VPQEHYVRITGLYPTLN | helicase@Aruba(NC_045512@Aruba: + : 16237-18039) | 241-257 |
| 2 | 144-153 | PRRARSVRYP | linker | 1-10 |
| 2 | 154-164 | RQALLKTVQFC | RNA-dependent_RNA_polymerase@Aruba(NC_045512@Aruba: + : 13442-13468 + 13468-16236) | 183-193 |
| 2 | 165-174 | PRRARSVRYP | linker | 1-10 |
| 2 | 175-182 | YDKLVSSF | nsp3(NC_045512: + : 2720-8554) | 365-372 |
| 2 | 183-192 | PRRARSVRYP | linker | 1-10 |
| 2 | 193-212 | KLTCATTRQVVNVVTTKIAL | nsp3(NC_045512: + : 2720-8554) | 1923-1942 |
| 2 | 213-222 | PRRARSVRYP | linker | 1-10 |
| 2 | 223-233 | VVNAANVYLKH | nsp3(NC_045512: + : 2720-8554) | 239-249 |
| 2 | 234-243 | PRRARSVRYP | linker | 1-10 |
| 2 | 244-257 | TKDVVECLKLSHQS | nsp3(NC_045512: + : 2720-8554) | 1830-1843 |
| 2 | 258-267 | PRRARSVRYP | linker | 1-10 |
| 2 | 268-276 | YDLSVVNAR | helicase(NC_045512: + : 16237-18039) | 382-390 |
| 2 | 277-286 | PRRARSVRYP | linker | 1-10 |
| 2 | 287-296 | ACIDCSARHI | nsp3(NC_045512: + : 2720-8554) | 1872-1881 |
| 2 | 297-306 | PRRARSVRYP | linker | 1-10 |
| 2 | 307-316 | NYQCGHYKHI | nsp3(NC_045512: + : 2720-8554) | 1012-1021 |
| 2 | 317-326 | PRRARSVRYP | linker | 1-10 |
| 2 | 327-336 | KACVEEVTTT | nsp3(NC_045512: + : 2720-8554) | 415-424 |
| 2 | 337-346 | PRRARSVRYP | linker | 1-10 |
| 2 | 347-354 | FNSVCRLM | helicase@Aruba(NC_045512@Aruba: + : 16237-18039) | 422-429 |
| 2 | 355-364 | PRRARSVRYP | linker | 1-10 |
| 2 | 365-379 | FKELLVYAADPAMHA | RNA-dependent_RNA_polymerase(NC_045512: + : 13442-13468 + 13468-16236) | 368-382 |
| 2 | 380-389 | PRRARSVRYP | linker | 1-10 |
| 2 | 390-399 | SVELKHFFFA | RNA-dependent_RNA_polymerase(NC_045512: + : 13442-13468 + 13468-16236) | 434-443 |
| 2 | 400-409 | PRRARSVRYP | linker | 1-10 |
| 2 | 410-418 | RSVYPVASP | nsp2(NC_045512: + : 806-2719) | 121-129 |
| 2 | 419-428 | PRRARSVRYP | linker | 1-10 |
| 2 | 429-446 | CANFNVLFSTVFPFTSFG | RNA-dependent_RNA_polymerase@Nigeria(NC_045512@Nigeria: + : 13442-13468 + 13468-16236) | 310-327 |
| 2 | 447-456 | PRRARSVRYP | linker | 1-10 |
| 2 | 457-469 | ANFCALILAYCNK | nsp3(NC_045512: + : 2720-8554) | 890-902 |
| 2 | 470-479 | PRRARSVRYP | linker | 1-10 |
| 2 | 480-495 | TVLKKCKSAFYILPSI | nsp3(NC_045512: + : 2720-8554) | 526-541 |
| 2 | 496-505 | PRRARSVRYP | linker | 1-10 |
| 2 | 506-520 | ERFVSLAIDAYPLTK | RNA-dependent_RNA_polymerase(NC_045512: + : 13442-13468 + 13468-16236) | 857-871 |
| 2 | 521-530 | PRRARSVRYP | linker | 1-10 |
| 2 | 531-543 | IVKFISTCACEIV | nsp2(NC_045512: + : 806-2719) | 468-480 |
| 2 | 544-553 | PRRARSVRYP | linker | 1-10 |
| 2 | 554-561 | DSYFVVKR | RNA-dependent_RNA_polymerase(NC_045512: + : 13442-13468 + 13468-16236) | 67-74 |
| 2 | 562-571 | PRRARSVRYP | linker | 1-10 |
| 2 | 572-591 | DDRCILHCANFNVLFSTVFP | RNA-dependent_RNA_polymerase(NC_045512: + : 13442-13468 + 13468-16236) | 303-322 |
| 2 | 592-601 | PRRARSVRYP | linker | 1-10 |
| 2 | 602-610 | VTANVNALL | RNA-dependent_RNA_polymerase(NC_045512: + : 13442-13468 + 13468-16236) | 700-708 |
| 2 | 611-620 | PRRARSVRYP | linker | 1-10 |
| 2 | 621-640 | LQKAAITILDGISQYSLRLI | nsp2(NC_045512: + : 806-2719) | 382-401 |
| 2 | 641-650 | PRRARSVRYP | linker | 1-10 |
| 2 | 651-673 | SHGKQVVSDIDYVPLKSATCITR | 3′-to-5′_exonuclease(NC_045512: + : 18040-19620) | 454-476 |
| 2 | 674-683 | PRRARSVRYP | linker | 1-10 |
| 2 | 684-696 | YAKPFLNKVVSTT | nsp3(NC_045512: + : 2720-8554) | 1323-1335 |
| 2 | 697-706 | PRRARSVRYP | linker | 1-10 |
| 2 | 707-733 | FSASTSAFVETVKGLDYKA | nsp2(NC_045512: + : 806-2719) | 300-326 |
| | | FKQIVESC | | |
| 2 | 734-743 | PRRARSVRYP | linker | 1-10 |
| 2 | 744-758 | ISNCVADYSVLYNSA | surface_glycoprotein@Aruba(NC_045512@Aruba: + : 21563-25384) | 354-368 |
| 2 | 759-768 | PRRARSVRYP | linker | 1-10 |
| 2 | 769-778 | KQYGDCLGNI | surface_glycoprotein@Jordan(NC_045512@Jordan: + : 21563-25384) | 831-840 |
| 2 | 779-788 | PRRARSVRYP | linker | 1-10 |
| 2 | 789-800 | FRSSVLHSTQDL | surface_glycoprotein@Aruba(NC_045512@Aruba: + : 21563-25384) | 43-54 |
| 2 | 801-810 | PRRARSVRYP | linker | 1-10 |
| 2 | 811-819 | TEIYQAGST | surface_glycoprotein@Aruba(NC_045512@Aruba: + : 21563-25384) | 466-474 |
| 2 | 820-829 | PRRARSVRYP | linker | 1-10 |
| 2 | 830-839 | GTNLPLQLGF | 3′-to-5′_exonuclease(NC_045512: + : 18040-19620) | 102-111 |
| 2 | 840-849 | PRRARSVRYP | linker | 1-10 |
| 2 | 850-861 | FSNVTWFHAIVS | surface_glycoprotein@Ghana(NC_045512@Ghana: + : 21563-25384) | 59-70 |
| 2 | 862-871 | PRRARSVRYP | linker | 1-10 |
| 2 | 872-895 | PINLVRDLPQGFSVLEPLVDLPIG | surface_glycoprotein@Belgium(NC_045512@Belgium: + : 21563-25384) | 205-228 |
| 2 | 896-905 | PRRARSVRYP | surface_glycoprotein@Nigeria(NC_045512@Nigeria: + : 21563-25384) | 886-895 |
| 2 | 906-915 | AGAALQIPFA | linker | 1-10 |
| 2 | 916-925 | PRRARSVRYP | linker | 1-10 |
| 2 | 926-941 | FSNVTWFHAIHVSGTN | surface_glycoprotein@Peru(NC_045512@Peru: + : 21563-25384) | 59-74 |
| 2 | 942-951 | PRRARSVRYP | linker | 1-10 |
| 2 | 952-966 | TISVTTEILPVSMAK | surface_glycoprotein@Mexico(NC_045512@Mexico: + : 21563-25384) | 719-733 |
| 2 | 967-976 | PRRARSVRYP | linker | 1-10 |
| 2 | 977-994 | LNDLCFTNVYADSFVIRG | surface_glycoprotein(NC_045512: + : 21563-25384) | 387-404 |
| 2 | 995-1004 | PRRARSVRYP | linker | 1-10 |
| 2 | 1005-1023 | ECAQVLSETVMCGGSLYVK | RNA-dependent_RNA_polymerase@Aruba(NC_045512@Aruba: + : 13442-13468 + 13468-16236) | 658-676 |
| 2 | 1024-1033 | PRRARSVRYP | linker | 1-10 |
| 2 | 1034-1048 | INAACRKVQHMVVKA | 3′-to-5′_exonuclease(NC_045512: + : 18040-19620) | 305-319 |
| 2 | 1049-1058 | PRRARSVRYP | linker | 1-10 |
| 2 | 1059-1072 | RLNVGDYFVLTSHT | helicase@Austria(NC_045512@Austria: + : 16237-18039) | 218-231 |
| 2 | 1073-1082 | PRRARSVRYP | linker | 1-10 |
| 2 | 1083-1091 | EPLLKGVKL | surface_glycoprotein@Croatia(NC_045512@Croatia: + : 21563-25384) | 1258-1266 |
| 2 | 1092-1101 | PRRARSVRYP | linker | 1-10 |
| 2 | 1102-1126 | SDIDITFLKKDAPYIVGDVVQEGVL | nsp3(NC_045512: + : 2720-8554) | 454-478 |
| 2 | 1127-1136 | PRRARSVRYP | linker | 1-10 |
| 2 | 1137-1151 | EFQFCNYPFLGVYHK | surface_glycoprotein@Norway(NC_045512@Norway: + : 21563-25384) | 129-143 |
| 2 | 1152-1161 | PRRARSVRYP | linker | 1-10 |
| 2 | 1162-1175 | GFNCYSPLQSYGFQ | surface_glycoprotein@Peru(NC_045512@Peru: + : 21563-25384) | 485-498 |
| 2 | 1176-1185 | PRRARSVRYP | linker | 1-10 |
| 2 | 1186-1199 | GFNCYFPLQPYGFQ | surface_glycoprotein@SmallSouthAmerica(NC_045512@SmallSouthAmerica: + : 21563-25384) | 481-494 |
| 2 | 1200-1209 | PRRARSVRYP | linker | 1-10 |
| 2 | 1210-1221 | FQTLLHRSYLTP | surface_glycoprotein@SmallAsia(NC_045512@SmallAsia: + : 21563-25384) | 230-241 |
| 2 | 1222-1231 | PRRARSVRYP | linker | 1-10 |
| 2 | 1232-1239 | KLGASQRV | membrane_glycoprotein(NC_045512: + : 26523-27191) | 180-187 |
| 2 | 1240-1249 | PRRARSVRYP | linker | 1-10 |
| 2 | 1250-1263 | TSGVGYQPYRVVVL | surface_glycoprotein@Aruba(NC_045512@Aruba: + : 21563-25384) | 496-509 |
| 2 | 1264-1273 | PRRARSVRYP | linker | 1-10 |
| 2 | 1274-1294 | ALCEKALKYFPIDKCSRIIPA | helicase@Colombia(NC_045512@Colombia: + : 16237-18039) | 316-336 |
| 2 | 1295-1304 | PRRARSVRYP | linker | 1-10 |
| 2 | 1305-1316 | ALGKLQDVVNQN | surface_glycoprotein(NC_045512: + : 21563-25384) | 944-955 |
| 2 | 1317-1326 | PRRARSVRYP | linker | 1-10 |
| 2 | 1327-1336 | KCAYWVPRAS | nsp2(NC_045512: + : 806-2719) | 239-248 |
| 2 | 1337-1346 | PRRARSVRYP | linker | 1-10 |
| 2 | 1347-1358 | ISVTTEILPVSM | surface_glycoprotein(NC_045512: + : 21563-25384) | 720-731 |
| 2 | 1359-1368 | PRRARSVRYP | linker | 1-10 |
| 2 | 1369-1380 | IEVQGYKSVNIT | nsp3(NC_045512: + : 2720-8554) | 13-24 |
| 2 | 1381-1390 | PRRARSVRYP | linker | 1-10 |
| 2 | 1391-1404 | FGTVYEKLKPVLDW | nsp2(NC_045512: + : 806-2719) | 437-450 |
| 2 | 1405-1414 | PRRARSVRYP | linker | 1-10 |
| 2 | 1415-1424 | FCLEASFNYL | nsp3(NC_045512: + : 2720-8554) | 1391-1400 |
| 2 | 1425-1434 | PRRARSVRYP | linker | 1-10 |
| 2 | 1435-1445 | YDKLQFTSLEI | helicase@Aruba(NC_045512@Aruba: + : 16237-18039) | 582-592 |
| 2 | 1 446-1455 | PRRARSVRYP | linker | 1-10 |
| 2 | 1456-1466 | DNVLSTFISAA | nsp3(NC_045512: + : 2720-8554) | 1809-1819 |
| 2 | 1467-1476 | PRRARSVRYP | linker | 1-10 |
| 2 | 1477-1484 | FTGCVIAW | surface_glycoprotein(NC_045512: + : 21563-25384) | 429-436 |
| 2 | 1485-1494 | PRRARSVRYP | linker | 1-10 |
| 2 | 1495-1504 | KQYGDCLGDI | surface_glycoprotein(NC_045512: + : 21563-25384) | 835-844 |
| 3 | 1-8 | QIGVVREF | helicase(NC_045512: + : 16237-18039) | 492-499 |
| 3 | 9-18 | PRRARSVRYP | linker | 1-10 |
| 3 | 19-40 | LGGMSYYCKSHKPSISFPLCAN | helicase@NewZealand(NC_045512@NewZealand: + : 16237-18039) | 65-86 |
| 3 | 41-50 | PRRARSVRYP | linker | 1-10 |
| 3 | 51-60 | DPIHSLRVCV | nsp3(NC_045512: + : 2720-8554) | 339-348 |
| 3 | 61-70 | PRRARSVRYP | linker | 1-10 |
| 3 | 71-88 | SQHTMLVKQGDDYVYLPY | RNA-dependent_RNA_polymerase@Aruba(NC_045512@Aruba: + : 13442-13468 + 13468-16236) | 814-831 |
| 3 | 89-98 | PRRARSVRYP | linker | 1-10 |
| 3 | 99-107 | ASQGLLASI | RNA-dependent_RNA_polymerase@Austria(NC_045512@Austria: + : 13442-13468 + 13468-16236) | 108-117 |
| 3 | 771-779 | PRRARSVRYP | linker | 1-10 |
| 3 | 118-143 | YRLANECAQVLSEMVMCGGSLYVKPG | RNA-dependent_RNA_polymerase@Australia | 653-678 |
| | | | (NC_045512@Australia: + : 13442-13468 + 13468-16236) | |
| 3 | 144-153 | PRRARSVRYP | linker | 1-10 |
| 3 | 154-185 | IMASLVLARKHTTCCSLSHRF | RNA-dependent_RNA_polymerase(NC_045512: + : 13442-13468 + 13468-16236) | 632-663 |
| | | YRLANECAQVL | | |
| 3 | 186-195 | PRRARSVRYP | linker | 1-10 |
| 3 | 196-212 | LECNVKTTEVVGDIILK | nsp3(NC_045512: + : 2720-8554) | 1244-1260 |
| 3 | 213-222 | PRRARSVRYP | linker | 1-10 |
| 3 | 223-236 | SYLFQHANLDSCKR | nsp3(NC_045512: + : 2720-8554) | 915-928 |
| 3 | 237-246 | PRRARSVRYP | linker | 1-10 |
| 3 | 247-256 | LSVNPYVCNA | helicase@Cyprus(NC_045512@Cyprus: + : 16237-18039) | 43-52 |
| 3 | 257-266 | PRRARSVRYP | linker | 1-10 |
| 3 | 267-277 | EQYVFCTVNAL | helicase(NC_045512: + : 16237-18039) | 353-363 |
| 3 | 278-287 | PRRARSVRYP | linker | 1-10 |
| 3 | 288-297 | VQQESPFVMM | nsp3(NC_045512: + : 2720-8554) | 980-989 |
| 3 | 298-307 | PRRARSVRYP | linker | 1-10 |
| 3 | 308-316 | MPVCVETKA | nsp3(NC_045512: + : 2720-8554) | 571-579 |
| 3 | 317-326 | PRRARSVRYP | linker | 1-10 |
| 3 | 327-349 | YLGGMSYYCKSHKLPISFPLCAN | helicase@CostaRica(NC_045512@CostaRica: + : 16237-18039) | 64-86 |
| 3 | 350-359 | PRRARSVRYP | linker | 1-10 |
| 3 | 360-375 | RKIFVDGVPFVVSTGY | RNA-dependent_RNA_polymerase(NC_045512: + : 13442-13468 + 13468-16236) | 331-346 |
| 3 | 376-385 | PRRARSVRYP | linker | 1-10 |
| 3 | 386-397 | VPVVDSYYSLLM | RNA-dependent_RNA_polymerase(NC_045512: + : 13442-13468 + 13468-16236) | 231-242 |
| 3 | 398-407 | PRRARSVRYP | linker | 1-10 |
| 3 | 408-417 | VMCGGSLYVK | RNA-dependent_RNA_polymerase(NC_045512: + : 13442-13468 + 13468-16236) | 667-676 |
| 3 | 418-427 | PRRARSVRYP | linker | 1-10 |
| 3 | 428-435 | DMYSVMLT | RNA-dependent_RNA_polymerase@Malaysia(NC_045512@ | 901-908 |
| | | | Malaysia: + : 13442-13468 + 13468-16236) | |
| 3 | 436-445 | PRRARSVRYP | linker | 1-10 |
| 3 | 446-453 | GVYCCREH | nsp2(NC_045512: + : 806-2719) | 47-54 |
| 3 | 454-463 | PRRARSVRYP | linker | 1-10 |
| 3 | 464-478 | YNLLKGCPAVAKHDF | RNA-dependent_RNA_polymerase@Poland(NC_045512@Poland: + : 13442-13468 + 13468-16236) | 87-101 |
| 3 | 479-488 | PRRARSVRYP | linker | 1-10 |
| 3 | 489-500 | NIGCNHTGVVGE | nsp2(NC_045512: + : 806-2719) | 250-261 |
| 3 | 501-510 | PRRARSVRYP | linker | 1-10 |
| 3 | 511-532 | SQHTMLVKQFDDYVYLPYPDPS | RNA-dependent_RNA_polymerase@Estonia(NC_045512@ | 814-835 |
| | | | Estonia: + : 13442-13468 + 13468-16236) | |
| 3 | 533-542 | PRRARSVRYP | linker | 1-10 |
| 3 | 543-550 | STFKCYGV | surface_glycoprotein@Aruba(NC_045512@Aruba: + : 21563-25384) | 371-378 |
| 3 | 551-560 | PRRARSVRYP | linker | 1-10 |
| 3 | 561-574 | ANPVLPFNDGVYFA | surface_glycoprotein@Austria(NC_045512@Austria: + : 21563-25384) | 77-90 |
| 3 | 575-584 | PRRARSVRYP | linker | 1-10 |
| 3 | 585-596 | VTMPLGYVTHGL | nsp3(NC_045512: + : 2720-8554) | 628-639 |
| 3 | 597-606 | PRRARSVRYP | linker | 1-10 |
| 3 | 607-645 | GCDVTDVTQLYLGGMSYYCKS | helicase(NC_045512: + : 16237-18039) | 54-92 |
| | | HKPPISFPLCANGQVFGL | | |
| 3 | 646-655 | PRRARSVRYP | linker | 1-10 |
| 3 | 656-686 | YIWLGFIAGLIAIVMVTI | surface_glycoprotein@Aruba(NC_045512@Aruba: + : 21563-25384) | 1211-1241 |
| | | MLCCMTSCCSCLK | | |
| 3 | 687-696 | PRRARSVRYP | linker | 1-10 |
| 3 | 697-708 | EVFAQVKQIYKT | surface_glycoprotein@Aruba(NC_045512@Aruba: + : 21563-25384) | 776-787 |
| 3 | 709-718 | PRRARSVRYP | linker | 1-10 |
| 3 | 719-737 | DKSAFVNLKQLPFFYYSDS | 3′-to-5′_exonuclease(NC_045512: + : 18040-19620) | 432-450 |
| 3 | 738-747 | PRRARSVRYP | linker | 1-10 |
| 3 | 748-763 | LQSLQTYVTQQLIRAA | surface_glycoprotein(NC_045512: + : 21563-25384) | 1001-1016 |
| 3 | 764-773 | PRRARSVRYP | linker | 1-10 |
| 3 | 774-782 | FFSNVTWFH | surface_glycoprotein(NC_045512: + : 21563-25384) | 58-66 |
| 3 | 783-792 | PRRARSVRYP | linker | 1-10 |
| 3 | 793-807 | RIIPARARVECFDKF | helicase@Aruba(NC_045512@Aruba: + : 16237-18039) | 332-346 |
| 3 | 808-817 | PRRARSVRYP | linker | 1-10 |
| 3 | 818-831 | FFSNVTWFHAIHVS | surface_glycoprotein@Bangladesh(NC_045512@Bangladesh: + : 21563-25384) | 58-71 |
| 3 | 832-841 | PRRARSVRYP | linker | 1-10 |
| 3 | 842-855 | EGVVDYGARFYFYT | nsp3(NC_045512: + : 2720-8554) | 595-608 |
| 3 | 856-865 | PRRARSVRYP | linker | 1-10 |
| 3 | 866-887 | GYQPYRVVVLSFELLHAPATVC | surface_glycoprotein(NC_045512: + : 21563-25384) | 504-525 |
| 3 | 888-897 | PRRARSVRYP | linker | 1-10 |
| 3 | 898-916 | QVAVLYQDVNCTEVPVAIH | surface_glycoprotein@China(NC_045512@China: + : 21563-25384) | 607-625 |
| 3 | 917-926 | PRRARSVRYP | linker | 1-10 |
| 3 | 927-941 | FSVAALTNNVAFQTV | RNA-dependent_RNA_polymerase(NC_045512: + : 13442-13468 + 13468-16236) | 396-410 |
| 3 | 942-951 | PRRARSVRYP | linker | 1-10 |
| 3 | 952-959 | TDVVYRAF | RNA-dependent_RNA_polymerase@Aruba(NC_045512@Aruba: + : 13442-13468 + 13468-16236) | 28-35 |
| 3 | 960-969 | PRRARSVRYP | linker | 1-10 |
| 3 | 970-981 | FNCYFPLQSYGF | surface_glycoprotein(NC_045512: + : 21563-25384) | 486-497 |
| 3 | 982-991 | PRRARSVRYP | linker | 1-10 |
| 3 | 992-999 | PSFLGRYM | nsp3(NC_045512: + : 2720-8554) | 822-829 |
| 3 | 1000-1009 | PRRARSVRYP | linker | 1-10 |
| 3 | 1010-1028 | KLNVGDYFVLTSHTVMPLS | helicase(NC_045512: + : 16237-18039) | 218-236 |
| 3 | 1029-1038 | PRRARSVRYP | linker | 1-10 |
| 3 | 1039-1054 | GSNVFQTRAGCLIGAE | surface_glycoprotein(NC_045512: + : 21563-25384) | 639-654 |
| 3 | 1055-1064 | PRRARSVRYP | linker | 1-10 |
| 3 | 1065-1074 | SVLNDILARL | surface_glycoprotein@Aruba(NC_045512@Aruba: + : 21563-25384) | 971-980 |
| 3 | 1075-1084 | PRRARSVRYP | linker | 1-10 |
| 3 | 1085-1107 | RVDFCGKGYHLMSFPQSAPHGVV | surface_glycoprotein(NC_045512: + : 21563-25384) | 1039-1061 |
| 3 | 1108-1117 | PRRARSVRYP | linker | 1-10 |
| 3 | 1118-1135 | CANFNVLFSTVFPPTSFG | RNA dependent_RNA_polymerase@China(NC_045512@China: + : 13442-13468 + 13468-16236) | 310-327 |
| 3 | 1136-1145 | PRRARSVRYP | linker | 1-10 |
| 3 | 1146-1159 | ETKCTLKSFTVEKG | surface_glycoprotein@Aruba(NC_045512@Aruba: + : 21563-25384) | 294-307 |
| 3 | 1160-1169 | PRRARSVRYP | linker | 1-10 |
| 3 | 1170-1191 | NVVIKVCEFQFCNYPFLGVYYH | surface_glycoprotein@Brazil(NC_045512@Brazil: + : 21563-25384) | 125-146 |
| 3 | 1192-1201 | PRRARSVRYP | linker | 1-10 |
| 3 | 1202-1210 | SPDVDLADI | surface_glycoprotein@Chile(NC_045512@Chile: + : 21563-25384) | 1161-1169 |
| 3 | 1211-1220 | PRRARSVRYP | linker | 1-10 |
| 3 | 1221-1237 | SAAYYVGYLQLRTFLLK | surface_glycoprotein@Italy(NC_045512@Italy: + : 21563-25384) | 258-274 |
| 3 | 1238-1247 | PRRARSVRYP | linker | 1-10 |
| 3 | 1248-1267 | MTSCCSCLKGCCSCGSCCKF | surface_glycoprotein(NC_045512: + : 21563-25384) | 1237-1256 |
| 3 | 1268-1277 | PRRARSVRYP | linker | 1-10 |
| 3 | 1278-1288 | HFPRKGVFVSN | surface_glycoprotein@SmallAsia(NC_045512@SmallAsia: + : 21563-25384) | 1078-1088 |
| 3 | 1289-1298 | PRRARSVRYP | linker | 1-10 |
| 3 | 1299-1308 | NEFYAYLRKH | RNA-dependent_RNA_polymerase(NC_045512: + : 13442-13468 + 13468-16236) | 743-752 |
| 3 | 1309-1318 | PRRARSVRYP | linker | 1-10 |
| 3 | 1319-1332 | IKVCEFQFCNDPYY | surface_glycoprotein@CostaRica(NC_045512@CostaRica: + : 21563-25384) | 128-141 |
| 3 | 1333-1342 | PRRARSVRYP | linker | 1-10 |
| 3 | 1343-1359 | YADVFHLYLQYIRKLHD | RNA-dependent_RNA_polymerase(NC_045512: + : 13442-13468 + 13468-16236) | 877-893 |
| 3 | 1360-1369 | PRRARSVRYP | linker | 1-10 |
| 3 | 1370-1384 | ARSVARQSIIAYTMS | surface_glycoprotein@Mozambique(NC_045512@Mozambique: + : 21563-25384) | 680-694 |
| 3 | 1385-1394 | PRRARSVRYP | linker | 1-10 |
| 3 | 1395-1404 | KSASVYYSQL | nsp3(NC_045512: + : 2720-8554) | 1737-1746 |
| 3 | 1405-1414 | PRRARSVRYP | linker | 1-10 |
| 3 | 1415-1430 | ANSIVCRFDTRVLSNL | 3′-to-5′_exonuclease(NC_045512: + : 18040-19620) | 394-409 |
| 3 | 1431-1440 | PRRARSVRYP | linker | 1-10 |
| 3 | 1441-1448 | PVLKGVKL | surface_glycoprotein@Aruba(NC_045512@Aruba: + : 21563-25384) | 1259-1266 |
| 3 | 1449-1458 | PRRARSVRYP | linker | 1-10 |
| 3 | 1459-1478 | PINLVRGLPQGFSVLEPLVD | surface_glycoprotein@SmallAfrica(NC_045512@SmallAfrica: + : 21563-25384) | 209-228 |
| 3 | 1479-1488 | PRRARSVRYP | linker | 1-10 |
| 3 | 1489-1502 | APGCDVTDVTQLYL | helicase@Aruba(NC_045512@Aruba: + : 16237-18039) | 52-65 |
| 4 | 1-12 | VRTNVYLAVFDK | nsp3(NC_045512: + : 2720-8554) | 351-362 |
| 4 | 13-22 | PRRARSVRYP | linker | 1-10 |
| 4 | 23-33 | KGVQIPCTCGK | nsp3(NC_045512: + : 2720-8554) | 963-973 |
| 4 | 34-43 | PRRARSVRYP | linker | 1-10 |
| 4 | 44-66 | NHDLYCQVHGNAHVASCDAIMTR | 3′-to-5′_exonuclease(NC_045512: + : 18040-19620) | 256-278 |
| 4 | 67-76 | PRRARSVRYP | linker | 1-10 |
| 4 | 77-84 | YDFAVSKG | RNA-dependent_RNA_polymerase@Aruba(NC_045512@Aruba: + : 13442-13468 + 13468-16236) | 420-427 |
| 4 | 85-94 | PRRARSVRYP | linker | 1-10 |
| 4 | 95-104 | ISDYDYYRYN | RNA-dependent_RNA_polymerase@Aruba(NC_045512@Aruba: + : 13442-13468 + 13468-16236) | 450-459 |
| 4 | 105-114 | PRRARSVRYP | linker | 1-10 |
| 4 | 115-122 | FKLASHMY | nsp3(NC_045512: + : 2720-8554) | 96-103 |
| 4 | 123-132 | PRRARSVRYP | linker | 1-10 |
| 4 | 133-147 | SYFAIGLALYYPSAR | helicase@Austria(NC_045512@Austria: + : 16237-18039) | 289-303 |
| 4 | 148-157 | PRRARSVRYP | linker | 1-10 |
| 4 | 158-166 | ASQGLVASI | RNA-dependent_RNA_polymerase@Aruba(NC_045512@Aruba: + : 13442-13468 + 13468-16236) | 771-779 |
| 4 | 167-176 | PRRARSVRYP | linker | 1-10 |
| 4 | 177-186 | VVADAVIKTL | nsp3(NC_045512: + : 2720-8554) | 56-65 |
| 4 | 187-196 | PRRARSVRYP | linker | 1-10 |
| 4 | 197-208 | SSPDAVTAYNGY | nsp3(NC_045512: + : 2720-8554) | 660-671 |
| 4 | 209-218 | PRRARSVRYP | linker | 1-10 |
| 4 | 219-226 | SINVANYQ | helicase@Mozambique(NC_045512@Mozambique: + : 16237-18039) | 263-270 |
| 4 | 227-236 | PRRARSVRYP | linker | 1-10 |
| 4 | 237-245 | SRELKVTFF | nsp3(NC_045512: + : 2720-8554) | 1134-1142 |
| 4 | 246-255 | PRRARSVRYP | linker | 1-10 |
| 4 | 256-267 | TRAKVGILCIMS | helicase(NC_045512: + : 16237-18039) | 566-577 |
| 4 | 268-277 | PRRARSVRYP | linker | 1-10 |
| 4 | 278-287 | GVITHDVSSA | helicase(NC_045512: + : 16237-18039) | 478-487 |
| 4 | 288-297 | PRRARSVRYP | linker | 1-10 |
| 4 | 298-317 | SEAVEAPLVGTPVCINGLML | nsp2(NC_045512: + : 806-2719) | 591-610 |
| 4 | 318-327 | PRRARSVRYP | linker | 1-10 |
| 4 | 328-338 | AVHECFVKRVD | 3′-to-5′_exonuclease(NC_045512: + : 18040-19620) | 281-291 |
| 4 | 339-348 | PRRARSVRYP | linker | 1-10 |
| 4 | 349-362 | RNLQHRLYECLYRN | RNA-dependent_RNA_polymerase(NC_045512: + : 13442-13468 + 13468-16236) | 721-734 |
| 4 | 363-372 | PRRARSVRYP | linker | 1-10 |
| 4 | 373-388 | SLRCGACIRRPFLCCK | helicase@Aruba(NC_045512@Aruba: + : 16237-18039) | 13-28 |
| 4 | 389-398 | PRRARSVRYP | linker | 1-10 |
| 4 | 399-411 | KASCTLSEQLDFI | nsp2(NC_045512: + : 806-2719) | 30-42 |
| 4 | 412-421 | PRRARSVRYP | linker | 1-10 |
| 4 | 422-438 | AQSFLNRVCGVSAARLT | RNA-dependent_RNA_polymerase(NC_045512: + : 13442-13468 + 13468-16236) | 4-20 |
| 4 | 439-448 | PRRARSVRYP | linker | 1-10 |
| 4 | 449-463 | QIELKFNPPALQDAY | nsp3(NC_045512: + : 2720-8554) | 867-881 |
| 4 | 464-473 | PRRARSVRYP | linker | 1-10 |
| 4 | 474-491 | IKVCEFQFCNDPFLGVYH | surface_glycoprotein@Aruba(NC_045512@Aruba: + : 21563-25384) | 125-142 |
| 4 | 492-501 | PRRARSVRYP | linker | 1-10 |
| 4 | 502-516 | HYVRITGLYPTLNIL | helicase@Indonesia(NC_045512@Indonesia: + : 16237-18039) | 245-259 |
| 4 | 517-526 | PRRARSVRYP | linker | 1-10 |
| 4 | 527-534 | YDFVVSKG | RNA-dependent_RNA_polymerase@Japan(NC_045512@Japan: + : 13442-13468 + 13468-16236) | 420-427 |
| 4 | 535-544 | PRRARSVRYP | linker | 1-10 |
| 4 | 545-564 | YVYLPYPDPSRILGAGCFVD | RNA-dependent_RNA_polymerase(NC_045512: + : 13442-13468 + 13468-16236) | 826-845 |
| 4 | 565-574 | PRRARSVRYP | linker | 1-10 |
| 4 | 575-625 | HFAIGLALYYPSARIVYTACSHAAV | helicase(NC_045512: + : 16237-18039) | 290-340 |
| | | DALCEKALKYLPIDKCSRIIPARARV | | |
| 4 | 626-635 | PRRARSVRYP | linker | 1-10 |
| 4 | 636-655 | RAKHYVYIGDPAQLPAPRTL | helicase(NC_045512: + : 16237-18039) | 392-411 |
| 4 | 656-665 | PRRARSVRYP | linker | 1-10 |
| 4 | 666-678 | WNVVRIKIVQMLS | 3′-to-5′_exonuclease(NC_045512: + : 18040-19620) | 159-171 |
| 4 | 679-688 | PRRARSVRYP | linker | 1-10 |
| 4 | 689-696 | IETISLAG | nsp3(NC_045512: + : 2720-8554) | 684-691 |
| 4 | 697-706 | PRRARSVRYP | linker | 1-10 |
| 4 | 707-717 | SELVIGAVILR | membrane_glycoprotein(NC_045512: + : 26523-27191) | 136-146 |
| 4 | 718-727 | PRRARSVRYP | linker | 1-10 |
| 4 | 728-746 | AIPINFTISVTTEILPVSM | surface_glycoprotein@Aruba(NC_045512@Aruba: + : 21563-25384) | 709-727 |
| 4 | 747-756 | PRRARSVRYP | linker | 1-10 |
| 4 | 757-766 | FEYVSQPFLM | surface_glycoprotein@Aruba(NC_045512@Aruba: + : 21563-25384) | 164-173 |
| 4 | 767-776 | PRRARSVRYP | linker | 1-10 |
| 4 | 777-792 | TGLHPTQAPTHLSVDT | 3′-to-5′_exonuclease(NC_045512: + : 18040-19620) | 16-31 |
| 4 | 793-802 | PRRARSVRYP | linker | 1-10 |
| 4 | 803-823 | HPNCVNCLDDRCILHCANFNV | RNA- dependent_RNA_polymerase@Australia(NC_045512 | 295-315 |
| | | | @Australia: + : 13442-13468 + 13468-16236) | |
| 4 | 824-833 | PRRARSVRYP | linker | 1-10 |
| 4 | 834-844 | RFQLHRSYLTP | surface_glycoprotein@Austria(NC_045512@Austria: + : 21563-25384) | 233-243 |
| 4 | 845-854 | PRRARSVRYP | linker | 1-10 |
| 4 | 855-874 | PINLVRGLPQGFSALEPLVD | surface_glycoprotein@Austria(NC_045512@Austria: + : 21563-25384) | 205-224 |
| 4 | 875-884 | PRRARSVRYP | linker | 1-10 |
| 4 | 885-895 | KESVQTFFKLV | nsp2(NC_045512: + : 806-2719) | 492-502 |
| 4 | 896-905 | PRRARSVRYP | linker | 1-10 |
| 4 | 906-928 | LIAIVMVTIMLCCITSCCSCLKG | surface_glycoprotein@Mozambique(NC_045512@Mozambique: + : 21563-25384) | 1220-1242 |
| 4 | 929-938 | PRRARSVRYP | linker | 1-10 |
| 4 | 939-955 | CSNLLLQYGSFCTQLNR | surface_glycoprotein(NC_045512: + : 21563-25384) | 749-765 |
| 4 | 956-965 | PRRARSVRYP | linker | 1-10 |
| 4 | 966-977 | TRAKVGILCITS | helicase@SouthKorea(NC_045512@SouthKorea: + : 16237-18039) | 566-577 |
| 4 | 978-987 | PRRARSVRYP | linker | 1-10 |
| 4 | 988-998 | YDNLQFISLEI | helicase@Austria(NC_045512@Austria: + : 16237-18039) | 582-592 |
| 4 | 999-1008 | PRRARSVRYP | linker | 1-10 |
| 4 | 1009-1021 | AIKCVPQADVEWK | 3′-to-5′_exonuclease(NC_045512: + : 18040-19620) | 337-349 |
| 4 | 1022-1031 | PRRARSVRYP | linker | 1-10 |
| 4 | 1032-1044 | NFRVQPTESIVRF | surface_glycoprotein(NC_045512: + : 21563-25384) | 317-329 |
| 4 | 1045-1054 | PRRARSVRYP | linker | 1-10 |
| 4 | 1055-1067 | ATNVVIKVCEFQF | surface_glycoprotein(NC_045512: + : 21563-25384) | 123-135 |
| 4 | 1068-1077 | PRRARSVRYP | linker | 1-10 |
| 4 | 1078-1087 | SSVLHSTQDF | surface_glycoprotein@Norway(NC_045512@Norway: + : 21563-25384) | 45-54 |
| 4 | 1088-1097 | PRRARSVRYP | linker | 1-10 |
| 4 | 1098-1105 | RVEAFEYY | nsp3(NC_045512: + : 2720-8554) | 810-817 |
| 4 | 1106-1115 | PRRARSVRYP | linker | 1-10 |
| 4 | 1116-1141 | YRLANECAQVLSEIV | RNA-dependent_RNA_polymerase@Canada(NC_045512@Canada: + : 13442-13468 + 13468-16236) | 653-678 |
| | | MCGGSLYVKPG | | |
| 4 | 1142-1151 | PRRARSVRYP | linker | 1-10 |
| 4 | 1152-1174 | GKIQDSLFSTASALGKLQDVVNQ | surface_glycoprotein@NorthMacedonia(NC_045512@NorthMacedonia: + : 21563-25384) | 928-950 |
| 4 | 1175-1184 | PRRARSVRYP | linker | 1-10 |
| 4 | 1185-1205 | AVLYQGVNCTEVPFAIHADQL | surface_glycoprotein@SmallAfrica(NC_045512@SmallAfrica: + : 21563-25384) | 605-625 |
| 4 | 1206-1215 | PRRARSVRYP | linker | 1-10 |
| 4 | 1216-1227 | YPSLETIQITIS | nsp3(NC_045512: + : 2720-8554) | 1483-1494 |
| 4 | 1228-1237 | PRRARSVRYP | linker | 1-10 |
| 4 | 1238-1247 | GNCDVVIGIV | surface_glycoprotein(NC_045512: + : 21563-25384) | 1124-1133 |
| 4 | 1248-1257 | PRRARSVRYP | linker | 1-10 |
| 4 | 1258-1273 | EEIIYNLLKDCPAVAK | RNA-dependent_RNA_polymerase@Senegal(NC_045512 | 83-98 |
| | | | @Senegal: + : 13442-13468 + 13468-16236) | |
| 4 | 1274-1283 | PRRARSVRYP | linker | 1-10 |
| 4 | 1284-1298 | VNCTEVPVAIHADQL | surface_glycoprotein(NC_045512: + : 21563-25384) | 615-629 |
| 4 | 1299-1308 | PRRARSVRYP | linker | 1-10 |
| 4 | 1309-1331 | TIATYCTGSIPCSVCLSGLDSLD | nsp3(NC_045512: + : 2720-8554) | 1459-1481 |
| 4 | 1332-1341 | PRRARSVRYP | linker | 1-10 |
| 4 | 1342-1364 | TQLYLGGMSYYCKPHKPPISFPL | helicase@Iceland(NC_045512@Iceland: + : 16237-18039) | 61-83 |
| 4 | 1365-1374 | PRRARSVRYP | linker | 1-10 |
| 4 | 1375-1385 | VLYQGVNCTEV | surface_glycoprotein@Aruba(NC_045512@Aruba: + : 21563-25384) | 606-616 |
| 4 | 1386-1395 | PRRARSVRYP | linker | 1-10 |
| 4 | 1396-1406 | IEELFYSYATH | 3′-to-5′_exonuclease(NC_045512: + : 18040-19620) | 363-373 |
| 4 | 1407-1416 | PRRARSVRYP | linker | 1-10 |
| 4 | 1417-1431 | AYYVGYLQPRTFLLK | surface_glycoprotein@Aruba(NC_045512@Aruba: + : 21563-25384) | 260-274 |
| 4 | 1432-1441 | PRRARSVRYP | linker | 1-10 |
| 4 | 1442-1456 | RTCCLCDRRATCFST | 3′-to-5′_exonuclease(NC_045512: + : 18040-19620) | 205-219 |
| 4 | 1457-1466 | PRRARSVRYP | linker | 1-10 |
| 4 | 1467-1474 | EIYQAGSK | surface_glycoprotein@Mexico(NC_045512@Mexico: + : 21563-25384) | 471-478 |
| 4 | 1475-1484 | PRRARSVRYP | linker | 1-10 |
| 4 | 1485-1494 | ARDLICAQKF | surface_glycoprotein(NC_045512: + : 21563-25384) | 846-855 |
| 4 | 1495-1504 | PRRARSVRYP | linker | 1-10 |
| 4 | 1505-1519 | TYACWHHSIGFDYVY | 3′-to-5′_exonuclease(NC_045512: + : 18040-19620) | 223-237 |

[0098] In certain embodiments, the vaccine comprises or expresses at least one of the concatemers of epitopes with intervening linker sequences (and as set forth in FIG. 23). In certain embodiments, the vaccine comprises or expresses at least two of the concatemers set forth below. In certain embodiments, the vaccine comprises or expresses three of the concatemers set forth below. In certain embodiments, the vaccine comprises or expresses all the concatemers set forth below.

TABLE 13

| | pos_in_ | | | pos_in_ |
|---|---|---|---|---|
| mmunoprec | concatemer | epitopes | gene | gene |
| 1 | 1-23 | QLALSKGVYFVCNLLLLFVTVYS | ORF3a_protein@Aruba(NC_045512@Aruba: + : 25393-26220) | 70-92 |
| 1 | 24-33 | PRRARSVRYP | linker | 1-10 |
| 1 | 34-48 | AYYVGYLQPRTFLLK | surface_glycoprotein@Aruba(NC_045512@Aruba: + : 21563-25384) | 260-274 |
| 1 | 49-58 | PRRARSVRYP | linker | 1-10 |
| 1 | 59-69 | SELVIGAVILR | membrane_glycoprotein(NC_045512: + : 26523-27191) | 136-146 |
| 1 | 70-79 | PRRARSVRYP | linker | 1-10 |
| 1 | 80-90 | RFQLHRSYLTP | surface_glycoprotein@Austria(NC_045512@Austria: + : 21563-25384) | 233-243 |
| 1 | 91-100 | PRRARSVRYP | linker | 1-10 |
| 1 | 101-108 | PVLKGVKL | surface_glycoprotein@Aruba(NC_045512@Aruba: + : 21563-25384) | 1259-1266 |
| 1 | 109-118 | PRRARSVRYP | linker | 1-10 |
| 1 | 119-131 | RSVASQSIIAYTM | surface_glycoprotein@Aruba(NC_045512@Aruba: + : 21563-25384) | 681-693 |
| 1 | 132-141 | PRRARSVRYP | linker | 1-10 |
| 1 | 142-156 | VDTSLSSLKLKDCVM | nsp6@Latvia(NC_045512@Latvia: + : 10973-11842) | 101-115 |
| 1 | 157-166 | PRRARSVRYP | linker | 1-10 |
| 1 | 167-185 | QLSLSKGFHFVCNLLLLFV | ORF3a_protein@Estonia(NC_045512@Estonia: + : 25393-26220) | 70-88 |
| 1 | 186-195 | PRRARSVRYP | linker | 1-10 |
| 1 | 196-205 | NCYDYCIPYN | ORF3a_protein(NC_045512: + : 25393-26220) | 152-161 |
| 1 | 206-215 | PRRARSVRYP | linker | 1-10 |
| 1 | 216-232 | KDQVILLNKHIDAYKTF | nucleocapsid_phosphoprotein@Aruba(NC_045512@Aruba: + : 28274-29533) | 347-363 |
| 1 | 233-242 | PRRARSVRYP | linker | 1-10 |
| 1 | 243-252 | PFTINCQEPK | ORF8_protein@India(NC_045512@India: + : 27894-28259) | 85-94 |
| 1 | 253-262 | PRRARSVRYP | linker | 1-10 |
| 1 | 263-285 | HQPYVVDDPCPIHFYSKWYIRVG | ORF8_protein(NC_045512: + : 27894-28259) | 28-50 |
| 1 | 286-295 | PRRARSVRYP | linker | 1-10 |
| 1 | 296-304 | YGIIWVATE | nucleocapsid_phosphoprotein@SmallSouthAmerica | 128-136 |
| | | | (NC_045512@SmallSouthAmerica: + : 28274-29533) | |
| 1 | 305-314 | PRRARSVRYP | linker | 1-10 |
| 1 | 315-332 | QLALFKGVHFVCNLLLLF | ORF3a_protein@CostaRica(NC_045512@CostaRica: + : 25393-26220) | 70-87 |
| 1 | 333-342 | PRRARSVRYP | linker | 1-10 |
| 1 | 343-357 | ALLAVFHSASKIITL | ORF3a_protein@Aruba(NC_045512@Aruba: + : 25393-26220) | 51-65 |
| 1 | 358-367 | PRRARSVRYP | linker | 1-10 |
| 1 | 368-375 | STFKCYGV | surface_glycoprotein@Aruba(NC_045512@Aruba: + : 21563-25384) | 371-378 |
| 1 | 376-385 | PRRARSVRYP | linker | 1-10 |
| 1 | 386-393 | EIYQAGSK | surface_glycoprotein@Mexico(NC_045512@Mexico: + : 21563-25384) | 471-478 |
| 1 | 394-403 | PRRARSVRYP | linker | 1-10 |
| 1 | 404-417 | RLTLGVYDYLVSTQ | nsp6(NC_045512: + : 10973-11842) | 236-249 |
| 1 | 418-427 | PRRARSVRYP | linker | 1-10 |
| 1 | 428-442 | VCNLLLLFVTVYSHL | ORF3a_protein@Croatia(NC_045512@Croatia: + : 25393-26220) | 80-94 |
| 1 | 443-452 | PRRARSVRYP | linker | 1-10 |
| 1 | 453-472 | DANYFLCWHTNCYHYCIPYN | ORF3a_protein@Indonesia(NC_045512@Indonesia: + : 25393-26220) | 142-161 |
| 1 | 473-482 | PRRARSVRYP | linker | 1-10 |
| 1 | 483-498 | GSNVFQTRAGCLIGAE | surface_glycoprotein(NC_045512: + : 21563-25384) | 639-654 |
| 1 | 499-508 | PRRARSVRYP | linker | 1-10 |
| 1 | 509-525 | INFVRIIMRLWLCLKCR | ORF3a_protein@Mozambique(NC_045512@Mozambique: + : 25393-26220) | 118-134 |
| 1 | 526-535 | PRRARSVRYP | linker | 1-10 |
| 1 | 536-544 | AAAYYVGYL | surface_glycoprotein(NC_045512: + : 21563-25384) | 262-270 |
| 1 | 545-554 | PRRARSVRYP | linker | 1-10 |
| 1 | 555-565 | AALALLLLDRL | nucleocapsid_phosphoprotein@Aruba(NC_045512@Aruba: + : 28274-29533) | 217-227 |
| 1 | 566-575 | PRRARSVRYP | linker | 1-10 |
| 1 | 576-589 | IKVCEFQFCNDPYY | surface_glycoprotein@CostaRica(NC_045512@CostaRica: + : 21563-25384) | 128-141 |
| 1 | 590-599 | PRRARSVRYP | linker | 1-10 |
| 1 | 600-609 | ISEHDYQIGG | ORF3a_protein@FrenchGuiana(NC_045512@FrenchGuiana: + : 25393-26220) | 179-188 |
| 1 | 610-619 | PRRARSVRYP | linker | 1-10 |
| 1 | 620-628 | DYYQLYSTQ | ORF3a_protein(NC_045512: + : 25393-26220) | 210-218 |
| 1 | 629-638 | PRRARSVRYP | linker | 1-10 |
| 1 | 639-657 | VKDCVLLHSYFTSDYYQLY | ORF3a_protein@Belgium(NC_045512@Belgium: + : 25393-26220) | 197-215 |
| 1 | 658-667 | PRRARSVRYP | linker | 1-10 |
| 1 | 668-679 | FNCYFPLQSYGF | surface_glycoprotein(NC_045512: + : 21563-25384) | 486-497 |
| 1 | 680-689 | PRRARSVRYP | linker | 1-10 |
| 1 | 690-699 | ARDLICAQKF | surface_glycoprotein(NC_045512: + : 21563-25384) | 846-855 |
| 1 | 700-709 | PRRARSVRYP | linker | 1-10 |
| 1 | 710-727 | IKVCEFQFCNDPFLGVYH | surface_glycoprotein@Aruba(NC_045512@Aruba: + : 21563-25384) | 125-142 |
| 1 | 728-737 | PRRARSVRYP | linker | 1-10 |
| 1 | 738-758 | VMFLARGIVFMCVDYCPIFFI | nsp6@Cyprus(NC_045512@Cyprus: + : 10973-11842) | 179-199 |
| 1 | 759-768 | PRRARSVRYP | linker | 1-10 |
| 1 | 769-782 | GFNCYSPLQSYGFQ | surface_glycoprotein@Peru(NC_045512@Peru: + : 21563-25384) | 485-498 |
| 1 | 783-792 | PRRARSVRYP | linker | 1-10 |
| 1 | 793-814 | QLALSKGVHFVCNLLLLFVTVY | ORF3a_protein@Australia(NC_045512@Australia: + : 25393-26220) | 70-91 |
| 1 | 815-824 | PRRARSVRYP | linker | 1-10 |
| 1 | 825-838 | ANPVLPFNDGVYFA | surface_glycoprotein@Austria(NC_045512@Austria: + : 21563-25384) | 77-90 |
| 1 | 839-848 | PRRARSVRYP | linker | 1-10 |
| 1 | 849-870 | SDFVRATATIPIRASLPFGWLI | ORF3a_protein@Belgium(NC_045512@Belgium: + : 25393-26220) | 26-47 |
| 1 | 871-880 | PRRARSVRYP | linker | 1-10 |
| 1 | 881-900 | PINLVRGLPQGFSVLEPLVD | surface_glycoprotein@SmallAfrica(NC_045512@SmallAfrica: + : 21563-25384) | 209-228 |
| 1 | 901-910 | PRRARSVRYP | linker | 1-10 |
| 1 | 911-932 | GYQPYRVVVLSFELLHAPATVC | surface_glycoprotein(NC_045512: + : 21563-25384) | 504-525 |
| 1 | 933-942 | PRRARSVRYP | linker | 1-10 |
| 1 | 943-959 | ILLNKHIDAYKTFPPIE | nucleocapsid_phosphoprotein@Chile(NC_045512@Chile: + : 28274-29533) | 351-367 |
| 1 | 960-969 | PRRARSVRYP | linker | 1-10 |
| 1 | 970-987 | LNDLCFTNVYADSFVIRG | surface_glycoprotein(NC_045512: + : 21563-25384) | 387-404 |
| 1 | 988-997 | PRRARSVRYP | linker | 1-10 |
| 1 | 998-1020 | KNPLLYDANYFLCCHTNCYDYCI | ORF3a_protein@Senegal(NC_045512@Senegal: + : 25393-26220) | 136-158 |
| 1 | 1021-1030 | PRRARSVRYP | linker | 1-10 |
| 1 | 1031-1052 | IAMACLVGLMWLSYFIASFRLF | membrane_glycoprotein@Aruba(NC_045512@Aruba: + : 26523-27191) | 82-103 |
| 1 | 1053-1062 | PRRARSVRYP | linker | 1-10 |
| 1 | 1063-1085 | VAAGLEAPFFYLYALVYFLQSIN | ORF3a_protein@Ecuador NC_045512@Ecuador + : 25393-26220) | 97-119 |
| 1 | 1086-1095 | PRRARSVRYP | linker | 1-10 |
| 1 | 1096-1123 | FTSDYYQLYSTQLSTYTGVEHVTFFIYN | ORF3a_protein@Latvia(NC_045512@Latvia: + : 25393-26220) | 207-234 |
| 1 | 1124-1133 | PRRARSVRYP | linker | 1-10 |
| 1 | 1134-1148 | EFQFCNYPFLGVYHK | surface_glycoprotein@Norway(NC_045512@Norway: + : 21563-25384) | 129-143 |
| 1 | 1149-1158 | PRRARSVRYP | linker | 1-10 |
| 1 | 1159-1179 | ELVIGAVILRGHLRIAGHHLG | membr ne_glycoprotein@Aruba(NC_045512@Aruba: + : 26523-27191) | 137-157 |
| 1 | 1180-1189 | PRRARSVRYP | linker | 1-10 |
| 1 | 1190-1201 | ISVTTEILPVSM | surface_glycoprotein(NC_045512: + : 21563-25384) | 720-731 |
| 2 | 1-8 | TQALLQRQ | nucleocapsid_phosphoprotein@Costa Rica(NC_045512@CostaRica: + : 28274-29533) | 379-386 |
| 2 | 9-18 | PRRARSVRYP | linker | 1-10 |
| 2 | 19-43 | KNPLLYDANYFLCWHTNCYDYCIPY | ORF3a_protein@Aruba(NC_045512@Aruba: + : 25393-26220) | 136-160 |
| 2 | 44-53 | PRRARSVRYP | linker | 1-10 |
| 2 | 54-61 | REGVFVSN | surface_glycoprotein@Aruba(NC_045512@Aruba: + : 21563-25384) | 1087-1094 |
| 2 | 62-71 | PRRARSVRYP | linker | 1-10 |
| 2 | 72-83 | FRSSVLHSTQDL | surface_glycoprotein@Aruba(NC_045512@Aruba: + : 21563-25384) | 43-54 |
| 2 | 84-93 | PRRARSVRYP | linker | 1-10 |
| 2 | 94-104 | LRIAGHHLGRC | membr ne_glycoprotein(NC_045512: + : 26523-27191) | 149-159 |
| 2 | 105-114 | PRRARSVRYP | linker | 1-10 |
| 2 | 115-128 | FFSNVTWFHAIHVS | surface_glycoprotein@Bangladesh(NC_045512@Bangladesh: + : 21563-25384) | 58-71 |
| 2 | 129-138 | PRRARSVRYP | linker | 1-10 |
| 2 | 139-147 | LKLKDCVMY | nsp6@Aruba(NC_045512@Aruba: + : 10973-11842) | 105-113 |
| 2 | 148-157 | PRRARSVRYP | linker | 1-10 |
| 2 | 158-166 | EPLLKGVKL | surface_glycoprotein@Croatia(NC_045512@Croatia: + : 21563-25384) | 1258-1266 |
| 2 | 167-176 | PRRARSVRYP | linker | 1-10 |
| 2 | 177-192 | NYTVSCSPFTINCQEP | ORF8_protein@CostaRica(NC_045512@CostaRica: + : 27894-28259) | 78-93 |
| 2 | 193-202 | PRRARSVRYP | linker | 1-10 |
| 2 | 203-211 | ISEHDYHIG | ORF3a_protein@NorthMacedonia(NC_045512@NorthMacedonia: + : 25393-26220) | 179-187 |
| 2 | 212-221 | PRRARSVRYP | linker | 1-10 |
| 2 | 222-232 | CLPFTINCQKP | ORF8_protein@Brazil(NC_045512@Brazil: + : 27894-28259) | 83-93 |
| 2 | 233-242 | PRRARSVRYP | linker | 1-10 |
| 2 | 243-250 | SSIVITSG | ORF3a_protein@SouthKorea(NC_045512@SouthKorea: + : 25393-26220) | 165-172 |
| 2 | 251-260 | PRRARSVRYP | linker | 1-10 |
| 2 | 261-268 | WFTALTQH | nucleocapsid_phosphoprotein(NC_045512: + : 28274-29533) | 52-59 |
| 2 | 269-278 | PRRARSVRYP | linker | 1-10 |
| 2 | 279-286 | ETQALPQR | nucleocapsid_phosphoprotein@SmallNorthAmerica | 378-385 |
| | | | (NC_045512@SmallNorthAmerica: + : 28274-29533) | |
| 2 | 287-296 | PRRARSVRYP | linker | 1-10 |
| 2 | 297-320 | LGSLVVRCSFYEDFLEYHDVRVVL | ORF8_protein(NC_045512: + : 27894-28259) | 95-118 |
| 2 | 321-330 | PRRARSVRYP | linker | 1-10 |
| 2 | 331-352 | INLVRDLPQGFSALEPLVDLPI | surface_glycoprotein@Aruba(NC_045512@Aruba: + : 21563-25384) | 206-227 |
| 2 | 353-362 | PRRARSVRYP | linker | 1-10 |
| 2 | 363-374 | DTSLKLKECVMY | nsp6@SmallAsia(NC_045512@SmallAsia: + : 10973-11842) | 102-113 |
| 2 | 375-384 | PRRARSVRYP | linker | 1-10 |
| 2 | 385-407 | RVDFCGKGYHLMSFPQSAPHGVV | surface_glycoprotein(NC_045512: + : 21563-25384) | 1039-1061 |
| 2 | 408-417 | PRRARSVRYP | linker | 1-10 |
| 2 | 418-427 | GVGGKPCIKV | nsp6@Aruba(NC_045512@Aruba: + : 10973-11842) | 274-283 |
| 2 | 428-437 | PRRARSVRYP | linker | 1-10 |
| 2 | 438-459 | LLYDANYFLCWHINCYDYCIPY | ORF3a_protein@Estonia(NC_045512@Estonia: + : 25393-26220) | 139-160 |
| 2 | 460-469 | PRRARSVRYP | linker | 1-10 |
| 2 | 470-484 | VNCTEVPVAIHADQL | surface_glycoprotein(NC_045512: + : 21563-25384) | 615-629 |
| 2 | 485-494 | PRRARSVRYP | linker | 1-10 |
| 2 | 495-509 | YFTSDYYQLYSTQLI | ORF3a_protein@Indonesia(NC_045512@Indonesia: + : 25393-26220) | 206-220 |
| 2 | 510-519 | PRRARSVRYP | linker | 1-10 |
| 2 | 520-532 | ATNVVIKVCEFQF | surface_glycoprotein(NC_045512: + : 21563-25384) | 123-135 |
| 2 | 533-542 | PRRARSVRYP | linker | 1-10 |
| 2 | 543-556 | KHWPQIAQFAPSAS | nucleocapsid_phosphoprotein@Australia(NC_045512@Australia: + : 28274-29533) | 299-312 |
| 2 | 557-566 | PRRARSVRYP | linker | 1-10 |
| 2 | 567-576 | LPFTINCQEL | ORF8_protein@Mozambique(NC_045512@Mozambique: + : 27894-28259) | 84-93 |
| 2 | 577-586 | PRRARSVRYP | linker | 1-10 |
| 2 | 587-595 | VFSQCVNLT | surface_glycoprotein@Egypt(NC_045512@Egypt: + : 21563-25384) | 11-19 |
| 2 | 596-605 | PRRARSVRYP | linker | 1-10 |
| 2 | 606-626 | AVLYQGVNCTEVPFAIHADQL | surface_glycoprotein@SmallAfrica(NC_045512@SmallAfrica: + : 21563-25384) | 605-625 |
| 2 | 627-636 | PRRARSVRYP | linker | 1-10 |
| 2 | 637-644 | EVTPSGTW | nucleocapsid_phosphoprotein(NC_045512: + : 28274-29533) | 323-330 |
| 2 | 645-654 | PRRARSVRYP | linker | 1-10 |
| 2 | 655-666 | SVFQSASKIITL | ORF3a_protein@Iceland(NC_045512@Iceland: + : 25393-26220) | 54-65 |
| 2 | 667-676 | PRRARSVRYP | linker | 1-10 |
| 2 | 677-684 | AEVQIDRL | surface_glycoprotein(NC_045512: + : 21563-25384) | 989-996 |
| 2 | 685-694 | PRRARSVRYP | linker | 1-10 |
| 2 | 695-703 | FFSNVTWFH | surface_glycoprotein(NC_045512: + : 21563-25384) | 58-66 |
| 2 | 704-713 | PRRARSVRYP | linker | 1-10 |
| 2 | 714-721 | SDFVRATA | ORF3a_protein(NC_045512: + : 25393-26220) | 26-33 |
| 2 | 722-731 | PRRARSVRYP | linker | 1-10 |
| 2 | 732-742 | MMFVKHKHAFL | nsp6@Aruba(NC_045512@Aruba: + : 10973-11842) | 57-67 |
| 2 | 743-752 | PRRARSVRYP | linker | 1-10 |
| 2 | 753-762 | GNCDVVIGIV | surface_glycoprotein(NC_045512: + : 21563-25384) | 1124-1133 |
| 2 | 763-772 | PRRARSVRYP | linker | 1-10 |
| 2 | 773-787 | TYGVGYQPYRVVVLS | surface_glycoprotein@Australia(NC_045512@Australia: + : 21563-25384) | 496-510 |
| 2 | 788-797 | PRRARSVRYP | linker | 1-10 |
| 2 | 798-819 | NVVIKVCEFQFCNYPFLGVYYH | surface_glycoprotein@Brazil(NC_045512@Brazil: + : 21563-25384) | 125-146 |
| 2 | 820-829 | PRRARSVRYP | linker | 1-10 |
| 2 | 830-843 | ETKCTLKSFTVEKG | surface_glycoprotein@Aruba(NC_045512@Aruba: + : 21563-25384) | 294-307 |
| 2 | 844-853 | PRRARSVRYP | linker | 1-10 |
| 2 | 854-869 | FLVLLPLVSSQCVNLT | surface_glycoprotein@Aruba(NC_045512@Aruba: + : 21563-25384) | 4-19 |
| 2 | 870-879 | PRRARSVRYP | linker | 1-10 |
| 2 | 880-890 | VLYQGVNCTEV | surface_glycoprotein@Aruba(NC_045512@Aruba: + : 21563-25384) | 606-616 |
| 2 | 891-900 | PRRARSVRYP | linker | 1-10 |
| 2 | 901-929 | FLYIIKLIFLWLLWPVT | membrane_glycoprotein@Aruba(NC_045512@Aruba: + : 26523-27191) | 45-73 |
| | | LACFVLAAVYRI | | |
| 2 | 930-939 | PRRARSVRYP | linker | 1-10 |
| 2 | 940-954 | VEHVTFFIYNKIVDE | ORF3a_protein(NC_045512: + : 25393-26220) | 225-239 |
| 2 | 955-964 | PRRARSVRYP | linker | 1-10 |
| 2 | 965-979 | ARSVARQSIIAYTMS | surface_glycoprotein@Mozambique(NC_045512@Mozambique: + : 21563-25384) | 680-694 |
| 2 | 980-989 | PRRARSVRYP | linker | 1-10 |
| 2 | 990-1018 | TLQCIMLVYCFLGYFC | nsp6@Aruba(NC_045512@Aruba: + : 10973-11842) | 203-231 |
| | | TCYFGLFCLLNRY | | |
| 2 | 1019-1028 | PRRARSVRYP | linker | 1-10 |
| 2 | 1029-1045 | LFFFLYENAFLPFVMGI | nsp6@SmallSouthAmerica(NC_045512@SmallSouthAmerica: + : 10973-11842) | 33-49 |
| 2 | 1046-1055 | PRRARSVRYP | linker | 1-10 |
| 2 | 1056-1074 | AIPINFTISVTTEILPVSM | surface_glycoprotein@Aruba(NC_045512@Aruba: + : 21563-25384) | 709-727 |
| 2 | 1075-1084 | PRRARSVRYP | linker | 1-10 |
| 2 | 1085-1094 | KQYGDCLGDI | surface_glycoprotein(NC_045512: + : 21563-25384) 835-844 | |
| 2 | 1095-1104 | PRRARSVRYP | linker | 1-10 |
| 2 | 1105-1121 | INFVRIIMRLWLCCKCR | ORF3a_protein@Australia(NC_045512@Australia: + : 25393-26220) | 118-134 |
| 2 | 1122-1131 | PRRARSVRYP | linker | 1-10 |
| 2 | 1132-1148 | SAAYYVGYLQLRTFLLK | surface_glycoprotein@Italy(NC_045512@Italy: + : 21563-25384) | 258-274 |
| 2 | 1149-1158 | PRRARSVRYP | linker | 1-10 |
| 2 | 1159-1168 | SFKLKDCVMY | nsp6@Malaysia(NC_045512@Malaysia: + : 10973-11842) | 107-116 |
| 2 | 1169-1178 | PRRARSVRYP | linker | 1-10 |
| 2 | 1179-1197 | QVAVLYQDVNCTEVPVAIH | surface_glycoprotein@China(NC_045512@China: + : 21563-25384) | 607-625 |
| 2 | 1198-1207 | PRRARSVRYP | linker | 1-10 |
| 2 | 1208-1227 | MTSCCSCLKGCCSCGSCCKF | surface_glycoprotein(NC_045512: + : 21563-25384) 1237- | 1256 |
| 3 | 1-37 | VAAGLEAPFLYLYALVYFLQ | ORF3a_protein@Aruba(NC_045512@Aruba: + : 25393-26220) | 97-133 |
| | | SINFVRIIMRLWLCWKC | | |
| 3 | 38-47 | PRRARSVRYP | linker | 1-10 |
| 3 | 48-65 | IKDLPKEITVATSRTLSY | membrane_glycoprotein(NC_045512: + : 26523-27191) | 161-178 |
| 3 | 66-75 | PRRARSVRYP | linker | 1-10 |
| 3 | 76-90 | ISNCVADYSVLYNSA | surface_glycoprotein@Aruba(NC_045512@Aruba: + : 21563-25384) | 354-368 |
| 3 | 91-100 | PRRARSVRYP | linker | 1-10 |
| 3 | 101-113 | ISSVLNDILSRLD | surface_glycoprotein@Bangladesh(NC_045512@Bangladesh: + : 21563-25384) | 972-984 |
| 3 | 114-123 | PRRARSVRYP | linker | 1-10 |
| 3 | 124-136 | SMWALIISVTSNY | nsp6@Aruba(NC_045512@Aruba: + : 10973-11842) | 160-172 |
| 3 | 137-146 | PRRARSVRYP | linker | 1-10 |
| 3 | 147-160 | TSGVGYQPYRVVVL | surface_glycoprotein@Aruba(NC_045512@Aruba: + : 21563-25384) | 496-509 |
| 3 | 161-170 | PRRARSVRYP | linker | 1-10 |
| 3 | 171-190 | FPQSAPHGVVFLHVTYVPAQ | surface_glycoprotein@Aruba(NC_045512@Aruba: + : 21563-25384) | 1048-1067 |
| 3 | 191-200 | PRRARSVRYP | linker | 1-10 |
| 3 | 201-208 | VVNPVMEP | ORF3a_protein(NC_045512: + : 25393-26220) | 255-262 |
| 3 | 209-218 | PRRARSVRYP | linker | 1-10 |
| 3 | 219-228 | PRWYFYYLGT | nucleocapsid_phosphoprotein@Aruba(NC_045512@Aruba: + : 28274-29533) | 106-115 |
| 3 | 229-238 | PRRARSVRYP | linker | 1-10 |
| 3 | 239-246 | EHVQIHTI | ORF3a_protein(NC_045512: + : 25393-26220) | 242-249 |
| 3 | 247-256 | PRRARSVRYP | linker | 1-10 |
| 3 | 257-285 | SMWALIISVTSNYSGVVTIV | nsp6@SmallSouthAmerica(NC_045512@SmallSouthAmerica: + : 10973-11842) | 160-188 |
| | | MFLARGIVF | | |
| 3 | 286-295 | PRRARSVRYP | linker | 1-10 |
| 3 | 296-303 | APLIELCV | ORF8_protein(NC_045512: + : 27894-28259) | 55-62 |
| 3 | 304-313 | PRRARSVRYP | linker | 1-10 |
| 3 | 314-355 | TTVAAFHQECSLQSCTQHQPYVV | ORF8_protein@Bangladesh(NC_045512@Bangladesh: + : 27894-28259) | 11-52 |
| | | DDPCPIHFYSKWYIRVGAR | | |
| 3 | 356-365 | PRRARSVRYP | linker | 1-10 |
| 3 | 366-388 | TTVMFLARGIVFMCVEYCPIFFI | nsp6@Aruba(NC_045512@Aruba: + : 10973-11842) | 177-199 |
| 3 | 389-398 | PRRARSVRYP | linker | 1-10 |
| 3 | 399-408 | KQYGDCLGNI | surface_glycoprotein@Jordan(NC_045512@Jordan: + : 21563-25384) | 831-840 |
| 3 | 409-418 | PRRARSVRYP | linker | 1-10 |
| 3 | 419-441 | LIAIVMVTIMLCCITSCCSCLKG | surface_glycoprotein@Mozambique(NC_045512@Mozambique: + : 21563-25384) | 1220-1242 |
| 3 | 442-451 | PRRARSVRYP | linker | 1-10 |
| 3 | 452-467 | QLALSKGFHFVCNLLL | ORF3a_protein@Iceland(NC_045512@Iceland: + : 25393-26220) | 70-85 |
| 3 | 468-477 | PRRARSVRYP | linker | 1-10 |
| 3 | 478-485 | ISEHDYQI | ORF3a_protein@Aruba(NC_045512@Aruba: + : 25393-26220) | 179-186 |
| 3 | 486-495 | PRRARSVRYP | linker | 1-10 |
| 3 | 496-507 | ALGKLQDVVNQN | surface_glycoprotein(NC_045512: + : 21563-25384) | 944-955 |
| 3 | 508-517 | PRRARSVRYP | linker | 1-10 |
| 3 | 518-530 | NPVLPFNDGVYFA | surface_glycoprotein(NC_045512: + : 21563-25384) | 81-93 |
| 3 | 531-540 | PRRARSVRYP | linker | 1-10 |
| 3 | 541-556 | HWPQIAQFAPSASAFF | nucleocapsid_phosphoprotein@Aruba(NC_045512@Aruba: + : 28274-29533) | 300-315 |
| 3 | 557-566 | PRRARSVRYP | linker | 1-10 |
| 3 | 567-582 | LQSLQTYVTQQLIRAA | surface_glycoprotein(NC_045512: + : 21563-25384) | 1001-1016 |
| 3 | 583-592 | PRRARSVRYP | linker | 1-10 |
| 3 | 593-601 | APLIELCVD | ORF8_protein@Bangladesh(NC_045512@Bangladesh: + : 27894-28259) | 55-63 |
| 3 | 602-611 | PRRARSVRYP | linker | 1-10 |
| 3 | 612-619 | TQALPHRQ | nucleocapsid_phosphoprotein@Mozambique(NC_045512@Mozambique: + : 28274-29533) | 379-386 |
| 3 | 620-629 | PRRARSVRYP | linker | 1-10 |
| 3 | 630-644 | ALLAVFQSASKIITL | ORF3a_protein@Bangladesh(NC_045512@Bangladesh: + : 25393-26220) | 51-65 |
| 3 | 645-654 | PRRARSVRYP | linker | 1-10 |
| 3 | 655-668 | LMNVLTLVYKVYYG | nsp6@Aruba(NC_045512@Aruba: + : 10973-11842) | 139-152 |
| 3 | 669-678 | PRRARSVRYP | linker | 1-10 |
| 3 | 679-697 | CYDYCIPYNSVTSLIVITS | ORF3a_protein@Netherlands(NC_045512@Netherlands: + : 25393-26220) | 153-171 |
| 3 | 698-707 | PRRARSVRYP | linker | 1-10 |
| 3 | 708-724 | GVHFVCNLLLLFVIVYS | ORF3a_protein@Malaysia(NC_045512@Malaysia: + : 25393-26220) | 76-92 |
| 3 | 725-734 | PRRARSVRYP | linker | 1-10 |
| 3 | 735-742 | SVDCTMYI | surface_glycoprotein(NC_045512: + : 21563-25384) | 735-742 |
| 3 | 743-752 | PRRARSVRYP | linker | 1-10 |
| 3 | 753-760 | KLGASQRV | membrane_glycoprotein(NC_045512: + : 26523-27191) | 180-187 |
| 3 | 761-770 | PRRARSVRYP | linker | 1-10 |
| 3 | 771-788 | FLYENAFLPFAMGVIAMS | nsp6@Mexico(NC_045512@Mexico: + : 10973-11842) | 36-53 |
| 3 | 789-798 | PRRARSVRYP | linker | 1-10 |
| 3 | 799-810 | FRSSVLHSTRDL | surface_glycoprotein@Nigeria(NC_045512@Nigeria: + : 21563-25384) | 43-54 |
| 3 | 811-820 | PRRARSVRYP | linker | 1-10 |
| 3 | 821-833 | LLNVPLHGTILTR | membrane_glycoprotein(NC_045512: + : 26523-27191) | 119-131 |
| 3 | 834-843 | PRRARSVRYP | linker | 1-10 |
| 3 | 844-868 | VLVQSTQWSLFFFFYENAFLPFAMG | nsp6@Iceland(NC_045512@Iceland: + : 10973-11842) | 24-48 |
| 3 | 869-878 | PRRARSVRYP | linker | 1-10 |
| 3 | 879-886 | AALQIPFA | surface_glycoprotein(NC_045512: + : 21563-25384) | 892-899 |
| 3 | 887-896 | PRRARSVRYP | linker | 1-10 |
| 3 | 897-912 | FLVLLPLVSIQCVNLT | surface_glycoprotein@SmallNorthAmerica | 4-19 |
| | | | (NC_045512@SmallNorthAmerica: + : 21563-25384) | |
| 3 | 913-922 | PRRARSVRYP | linker | 1-10 |
| 3 | 923-943 | QWNLVIGFLFLTWICLLQFAY | membrane_glycoprotein@Aruba(NC_045512@Aruba: + : 26523-27191) | 19-39 |
| 3 | 944-953 | PRRARSVRYP | linker | 1-10 |
| 3 | 954-978 | VLVQSTQWSLFFFLYENAFLPFAMG | nsp6@Aruba(NC_045512@Aruba: + : 10973-11842) | 24-48 |
| 3 | 979-988 | PRRARSVRYP | linker | 1-10 |
| 3 | 989-999 | SPGVFNPVMEP | ORF3a_protein@Colombia(NC_045512@Colombia: + : 25393-26220) | 252-262 |
| 3 | 1000-1009 | PRRARSVRYP | linker | 1-10 |
| 3 | 1010-1017 | ISNCVADY | surface_glycoprotein(NC_045512: + : 21563-25384) | 358-365 |
| 3 | 1018-1027 | PRRARSVRYP | linker | 1-10 |
| 3 | 1028-1041 | TDTVVEHVTFFIYN | ORF3a_protein@Costa Rica(NC_045512@CostaRica: + : 25393-26220) | 221-234 |
| 3 | 1042-1051 | PRRARSVRYP | linker | 1-10 |
| 3 | 1052-1067 | NYTVSCLPFTINCQEP | ORF8_protein@Bangladesh(NC_045512@Bangladesh: + : 27894-28259) | 78-93 |
| 3 | 1068-1077 | PRRARSVRYP | linker | 1-10 |
| 3 | 1078-1087 | TQNVLYENQK | surface_glycoprotein(NC_045512: + : 21563-25384) | 912-921 |
| 3 | 1088-1097 | PRRARSVRYP | linker | 1-10 |
| 3 | 1098-1108 | HFPRKGVFVSN | surface_glycoprotein@SmallAsia(NC_045512@SmallAsia: + : 21563-25384) | 1078-1088 |
| 3 | 1109-1118 | PRRARSVRYP | linker | 1-10 |
| 3 | 1119-1128 | AGAALQIPFA | surface_glycoprotein@Nigeria(NC_045512@Nigeria: + : 21563-25384) | 886-895 |
| 3 | 1129-1138 | PRRARSVRYP | linker | 1-10 |
| 3 | 1139-1148 | FEYVSQPFLM | surface_glycoprotein@Aruba(NC_045512@Aruba: + : 21563-25384) | 164-173 |
| 3 | 1149-1158 | PRRARSVRYP | linker | 1-10 |
| 3 | 1159-1172 | TDTCVEHVTFFIYN | ORF3a_protein@Luxembourg(NC_045512@Luxembourg: + : 25393-26220) | 221-234 |
| 3 | 1173-1182 | PRRARSVRYP | surface_glycoprotein@Chile(NC_045512@Chile: + : 21563-25384) | 132-146 |
| 3 | 1183-1197 | EFQFCNDPFLGVYYH | linker | 1-10 |
| 4 | 1-10 | YDANYFLCWH | ORF3a_protein(NC_045512: + : 25393-26220) | 141-150 |
| 4 | 11-20 | PRRARSVRYP | linker | 1-10 |
| 4 | 21-32 | EVFAQVKQIYKT | surface_glycoprotein@Aruba(NC_045512@Aruba: + : 21563-25384) | 776-787 |
| 4 | 33-42 | PRRARSVRYP | linker | 1-10 |
| 4 | 43-53 | SAPLIELCLDE | ORF8_protein@Russia(NC_045512@Russia: + : 27894-28259) | 54-64 |
| 4 | 54-63 | PRRARSVRYP | linker | 1-10 |
| 4 | 64-87 | TTVAAFHQECSLQLCTQHQPYVVD | ORF8_protein@USA(NC_045512@USA: + : 27894-28259) | 11-34 |
| 4 | 88-97 | PRRARSVRYP | linker | 1-10 |
| 4 | 98-111 | LVLLPLVSSQCVNF | surface_glycoprotein@Brazil(NC_045512@Brazil: + : 21563-25384) | 5-18 |
| 4 | 112-121 | PRRARSVRYP | linker | 1-10 |
| 4 | 122-135 | SVASQSIIAYTMSL | surface_glycoprotein@Austria(NC_045512@Austria: + : 21563-25384) | 678-691 |
| 4 | 136-145 | PRRARSVRYP | linker | 1-10 |
| 4 | 146-154 | SPDVDLADI | surface_glycoprotein@Chile(NC_045512@Chile: + : 21563-25384) | 1161-1169 |
| 4 | 155-164 | PRRARSVRYP | linker | 1-10 |
| 4 | 165-184 | PINLVRGLPQGFSALEPLVD | surface_glycoprotein@Austria(NC_045512@Austria: + : 21563-25384) | 205-224 |
| 4 | 185-194 | PRRARSVRYP | linker | 1-10 |
| 4 | 195-203 | TEIYQAGST | surface_glycoprotein@Aruba(NC_045512@Aruba: + : 21563-25384) | 466-474 |
| 4 | 204-213 | PRRARSVRYP | linker | 1-10 |
| 4 | 214-238 | AAGLEAPFLYLYVLVYFLQSINFVR | ORF3a_protein@Norway(NC_045512@Norway: + : 25393-26220) | 98-122 |
| 4 | 239-248 | PRRARSVRYP | linker | 1-10 |
| 4 | 249-258 | ALLAVFHNAS | ORF3a_protein@SmallSouthAmerica(NC_045512@SmallSouthAmerica: + : 25393-26220) | 51-60 |
| 4 | 259-268 | PRRARSVRYP | linker | 1-10 |
| 4 | 269-277 | KHWPQIAQF | nucleocapsid_phosphoprotein(NC_045512: + : 28274-29533) | 299-307 |
| 4 | 278-287 | PRRARSVRYP | linker | 1-10 |
| 4 | 288-306 | VKDCVVLHSYFTSDYYQLY | ORF3a_protein@Aruba(NC_045512@Aruba: + : 25393-26220) | 197-215 |
| 4 | 307-316 | PRRARSVRYP | linker | 1-10 |
| 4 | 317-347 | YIWLGFIAGLIAIVMVTIM | surface_glycoprotein@Aruba(NC_045512@Aruba: + : 21563-25384) | 1211-1241 |
| | | LCCMTSCCSCLK | | |
| 4 | 348-357 | PRRARSVRYP | linker | 1-10 |
| 4 | 358-370 | FQTLLALHRSYLT | surface_glycoprotein@Aruba(NC_045512@Aruba: + : 21563-25384) | 234-246 |
| 4 | 371-380 | PRRARSVRYP | linker | 1-10 |
| 4 | 57-88 | MMFVKHKHAFLCLFLLPS | nsp6@Indonesia(NC_045512@Indonesia: + : 10973-11842) | 381-412 |
| | | FATVAYFNMVYMPA | | |
| 4 | 413-422 | PRRARSVRYP | linker | 1-10 |
| 4 | 423-439 | CSNLLLQYGSFCTQLNR | surface_glycoprotein(NC_045512: + : 21563-25384) | 749-765 |
| 4 | 440-449 | PRRARSVRYP | linker | 1-10 |
| 4 | 450-468 | LEILDITPCSFGGVSVITP | surface_glycoprotein(NC_045512: + : 21563-25384) | 582-600 |
| 4 | 469-478 | PRRARSVRYP | linker | 1-10 |
| 4 | 479-501 | YALVYFLQSINFVIIIMRLWLCW | ORF3a_protein@Denmark(NC_045512@Denmark: + : 25393-26220) | 109-131 |
| 4 | 502-511 | PRRARSVRYP | linker | 1-10 |
| 4 | 512-534 | KEITVATSRTLSYYKLGASQRVA | membrane_glycoprotein@Aruba(NC_045512@Aruba: + : 26523-27191) | 166-188 |
| 4 | 535-544 | PRRARSVRYP | linker | 1-10 |
| 4 | 545-554 | GLKLKDCVMY | nsp6@Peru(NC_045512@Peru: + : 10973-11842) | 107-116 |
| 4 | 555-564 | PRRARSVRYP | linker | 1-10 |
| 4 | 565-577 | NFRVQPTESIVRF | surface_glycoprotein(NC_045512: + : 21563-25384) | 317-329 |
| 4 | 578-587 | PRRARSVRYP | linker | 1-10 |
| 4 | 588-595 | SSIVITSV | ORF3a_protein@Aruba(NC_045512@Aruba: + : 25393-26220) | 165-172 |
| 4 | 596-605 | PRRARSVRYP | linker | 1-10 |
| 4 | 606-619 | ESVVKDCVVLHSYF | ORF3a_protein@CostaRica(NC_045512@CostaRica: + : 25393-26220) | 194-207 |
| 4 | 620-629 | PRRARSVRYP | linker | 1-10 |
| 4 | 630-651 | SDFVRATATIPIQASLPFGWLI | ORF3a_protein@Aruba(NC_045512@Aruba: + : 25393-26220) | 26-47 |
| 4 | 652-661 | PRRARSVRYP | linker | 1-10 |
| 4 | 662-684 | GKIQDSLFSTASALGKLQDVVNQ | surface_glycoprotein@NorthMacedonia | 928-950 |
| | | | (NC_045512@NorthMacedonia: + : 21563-25384) | |
| 4 | 685-694 | PRRARSVRYP | linker | 1-10 |
| 4 | 695-710 | ATVAYFNMVYMPASWV | nsp6@Aruba(NC_045512@Aruba: + : 10973-11842) | 76-91 |
| 4 | 711-720 | PRRARSVRYP | linker | 1-10 |
| 4 | 721-728 | SLIDLQEL | surface_glycoprotein(NC_045512: + : 21563-25384) | 1196-1203 |
| 4 | 729-738 | PRRARSVRYP | linker | 1-10 |
| 4 | 739-748 | SVLNDILARL | surface_glycoprotein@Aruba(NC_045512@Aruba: + : 21563-25384) | 971-980 |
| 4 | 749-758 | PRRARSVRYP | linker | 1-10 |
| 4 | 759-766 | YDPLQPEL | surface_glycoprotein(NC_045512: + : 21563-25384) | 1138-1145 |
| 4 | 767-776 | PRRARSVRYP | linker | 1-10 |
| 4 | 777-784 | FTGCVIAW | surface_glycoprotein(NC_045512: + : 21563-25384) | 429-436 |
| 4 | 785-794 | PRRARSVRYP | linker | 1-10 |
| 4 | 795-803 | EVFAQVKQI | surface_glycoprotein(NC_045512: + : 21563-25384) | 780-788 |
| 4 | 804-813 | PRRARSVRYP | linker | 1-10 |
| 4 | 814-829 | LMNVLTLFYKVYYGNA | nsp6@Chile(NC_045512@Chile: + : 10973-11842) | 142-157 |
| 4 | 830-839 | PRRARSVRYP | linker | 1-10 |
| 4 | 840-856 | EVTPSGTWLTYTGAIKL | nucleocapsid_phosphoprotein@Bulgaria(NC_045512@Bulgaria: + : 28274-29533) | 323-339 |
| 4 | 857-866 | PRRARSVRYP | linker | 1-10 |
| 4 | 867-882 | AFKLNIKLLGVGGKPC | nsp6(NC_045512: + : 10973-11842) | 268-283 |
| 4 | 883-892 | PRRARSVRYP | linker | 1-10 |
| 4 | 893-906 | GFNCYFPLQPYGFQ | surface_glycoprotein@SmallSouthAmerica | 481-494 |
| | | | (NC_045512@SmallSouthAmerica: + : 21563-25384) | |
| 4 | 907-916 | PRRARSVRYP | linker | 1-10 |
| 4 | 917-926 | SSVLHSTQDF | surface_glycoprotein@Norway(NC_045512@Norway: + : 21563-25384) | 45-54 |
| 4 | 927-936 | PRRARSVRYP | linker | 1-10 |
| 4 | 937-950 | ITTVAAFHQECSLQ | ORF8_protein@Aruba(NC_045512@Aruba: + : 27894-28259) | 10-23 |
| 4 | 951-960 | PRRARSVRYP | linker | 1-10 |
| 4 | 961-976 | FSNVTWFHAIHVSGTN | surface_glycoprotein@Peru(NC_045512@Peru: + : 21563-25384) | 59-74 |
| 4 | 977-986 | PRRARSVRYP | linker | 1-10 |
| 4 | 987-1004 | VTTVIFLARGIVFMCVEY | nsp6@Malaysia(NC_045512@Malaysia: + : 10973-11842) | 179-196 |
| 4 | 1005-1014 | PRRARSVRYP | linker | 1-10 |
| 4 | 1015-1025 | FFSNVTWFHVS | surface_glycoprotein@Nigeria(NC_045512@Nigeria: + : 21563-25384) | 58-68 |
| 4 | 1026-1035 | PRRARSVRYP | linker | 1-10 |
| 4 | 1036-1049 | IHFYSKWYIRVGAK | ORF8_protein@Mozambique(NC_045512@Mozambique: + : 27894-28259) | 39-52 |
| 4 | 1050-1059 | PRRARSVRYP | linker | 1-10 |
| 4 | 1060-1071 | FSNVTWFHAIVS | surface_glycoprotein@Ghana(NC_045512@Ghana: + : 21563-25384) | 59-70 |
| 4 | 1072-1081 | PRRARSVRYP | linker | 1-10 |
| 4 | 1082-1096 | IPIRASLPFGWLIVG | ORF3a_protein@Iceland(NC_045512@Iceland: + : 25393-26220) | 35-49 |
| 4 | 1097-1106 | PRRARSVRYP | linker | 1-10 |
| 4 | 1107-1114 | TDAVDCAL | surface_glycoprotein(NC_045512: + : 21563-25384) | 286-293 |
| 4 | 1115-1124 | PRRARSVRYP | linker | 1-10 |
| 4 | 1125-1136 | FQTLLHRSYLTP | surface_glycoprotein@SmallAsia(NC_045512@SmallAsia: + : 21563-25384) | 230-241 |
| 4 | 1137-1146 | PRRARSVRYP | linker | 1-10 |
| 4 | 1147-1170 | PINLVRDLPQGFSVLEPLVDLPIG | surface_glycoprotein@Belgium(NC_045512@Belgium: + : 21563-25384) | 205-228 |
| 4 | 1171-1180 | PRRARSVRYP | linker | 1-10 |
| 4 | 1181-1190 | SPGVVNPVME | ORF3a_protein@Brazil(NC_045512@Brazil: + : 25393-26220) | 252-261 |
| 4 | 1191-1200 | PRRARSVRYP | linker | 1-10 |
| 4 | 1201-1215 | TISVTTEILPVSMAK | surface_glycoprotein@Mexico(NC_045512@Mexico: + : 21563-25384) | 719-733 |

### Immune Response Enhancing Components:

[0099] In certain embodiments, the vaccines comprise or are capable of expressing one or more additional components to enhance the immune response to the one or more viral immunogens. These components may include, for example, targeting molecules, elements which enhance antigen processing, immunostimulatory molecules such as cytokines and other adjuvants. In certain embodiments, the vaccine comprises one or more fusion polypeptides comprising the one or more additional components and one or more concatemers of epitopes. The additional components include but are not limited to one or more targeting molecules/motifs. In certain embodiments where the vaccine comprises more than more concatemer, each concatemer is fused to one or more targeting molecules. The targeting molecules may be the same for all immunogens in the vaccine or different.

[0100] It is known in the art that targeting the immunogen to antigen presenting cells (APCs), including but not limited to dendritic cells, or enhancing antigen processing by APCs enhances immunogenicity.

[0101] In specific embodiments, the fusion protein comprises one or more CD74 or fragment thereof and one or more concatemer(s) of epitopes. In certain embodiments, the fusion protein comprises the CD74 transmembrane and cytoplasmic domain and one or more concatemer(s) of epitopes. In certain embodiments, the CD74 transmembrane and cytoplasmic domain has the sequence set forth below:

HRRRSRSCREDQKPVMDDQRDLISNNEQLPMLGRRP
GAPESKCSRGALYTGFSILVTLLLAGQATTAYFLY

[0102] In specific embodiments, the fusion protein comprises one or more human leukocyte antigen (HLA) or fragment thereof and the one or more immunogen or fragment thereof. In specific embodiments, the fusion protein comprises the HLA transmembrane and cytoplasmic domain and immunogen or fragment thereof.

[0103] In specific embodiment, the HLA fragment comprises the following sequence:

MVKCATLSVDSGQASDSSAAQTYSGGKRDSSKRRW
MVAAVVAGTIVAGLLVLGAIIGV

[0104] In certain embodiments, the targeting moiety is a chimeric targeting moiety comprising portions of different molecules. For example, the targeting moiety may comprise the cytoplasmic domain from one molecule fused to the transmembrane domain of another molecule. In certain embodiments, the targeting moiety comprises the CD74 cytoplasmic domain fused to an HLA transmembrane sequence. In specific embodiments, the targeting moiety comprises the following sequence:

HRRRSRSCREDQKPVMDDQRDLISNNEQLPMLGRR
PGAPESKCSRWMVAAVVAGTIVAGLLVLGAIIGV

### Other Elements:

[0105] The proteins of the present invention may also include tags. Appropriate tags are known in the art and include but are not limited to HA-, FLAG®- or myc- or alpha tags.

### Exemplary Vaccines

[0106] Non-limiting exemplary vaccines or concatemers expressed by exemplary vaccines are set forth in the figures.

### Vaccine Formulations

[0107] The vaccines formulations may also comprise pharmaceutically acceptable carriers, excipients and/or adjuvants. Adjuvants and carriers suitable for administering genetic vaccines and immunogens are known in the art. Conventional carriers and adjuvants are for example reviewed in Kiyono et al. 1996.

[0108] A vaccine adjuvant is a component that potentiates the immune responses to an antigen and/or modulates it towards the desired immune responses. A vaccine may include one or more adjuvants. Exemplary adjuvants include mineral salts including but not limited to aluminium salts (such as amorphous aluminum hydroxyphosphate sulfate (AAHS), aluminum hydroxide, aluminum phosphate, potassium aluminum sulfate (Alum)) and calcium phosphate gels; Oil emulsions and surfactant based formulations, including but not limited to MF59 (microfluidised detergent mmunoprec oil-in-water emulsion), QS21 (purified saponin), AS02 [SBAS2] (oil-in-water emulsion+MPL+QS-21), Montanide ISA-51 and ISA-720 (mmunoprec water-in-oil emulsion); Particulate adjuvants, including but not limited to virosomes (unilamellar liposomal vehicles incorporating influenza haemagglutinin), AS04 ([SBAS4] Al salt with MPL), ISCOMS (structured complex of saponins and lipids), polylactide co-glycolide (PLG). And; microbial derivatives (natural and synthetic), including but not limited to monophosphoryl lipid A (MPL), Detox (MPL+M. Phlei cell wall skeleton), AGP [RC-529] (synthetic acylated monosaccharide), DC_Chol (lipoidal immunostimulators able to self mmunopr into liposomes), OM-174 (lipid A derivative), CpG motifs (synthetic oligonucleotides containing immunostimulatory CpG motifs), modified LT and CT (genetically modified bacterial toxins to provide non-toxic adjuvant effects); endogenous human immunomodulators, including but not limited to hGM-CSF or hIL-12 (cytokines that can be administered either as protein or plasmid encoded), Immudaptin (C3d tandem array) and inert vehicles, such as gold particles.

[0109] The vaccine formulations may also comprise a stabilizer. Suitable stabilizer are known in the art and include but are not limited to amino acids, antioxidants, cyclodextrins, proteins, sugars/sugar alcohols, and surfactants. See for example Morefield, AAPS J. 2011 June; 13(2): 191-200; https://www.ncbi.nlm.nih.gov/pmc/articles/PMC3085699/).

[0110] The vaccine can be incorporated into liposomes, microspheres or other polymer matrices. Liposomes can consist of phospholipids or other lipids, and can be nontoxic, physiologically acceptable and metabolizable carriers that are relatively simple to make and administer.

[0111] Previously, it has been found that a SARS-COV-2 SAM lipid nanoparticle (LNP) vaccine induced high neutralizing antibody titers in mice (Mckay et al., Nat Commun 11, 3523 (2020). https://doi.org/10.1038/s41467-020-17409-9). Briefly, the LNP (described in US patent U.S. Pat. No. 10,221,127) contains an ionizable cationic lipid phosphatidylcholine/cholesterol/PEG-lipid. The SAM RNA were encapsulated in LNP using a self-assembly process in which an aqueous solution of SAM RNA at pH=4.0 is rapidly mixed with an ethanolic lipid mixture. LNP.

[0112] Accordingly, in certain embodiments, the vaccines formulations comprise lipid nanoparticle delivery formulations of nucleic acid-based vaccines. Optionally, the lipid is cationic. Appropriate cationic lipids are known in the art. Non-limiting examples include phosphatidylcholine/cholesterol/PEG-lipid, C12-200, dimethyldioctadecylammonium (DDA), 1,2-dioleoyl-3-trimethylammonium propane (DOTAP) or 1,2-dilinoleyloxy-3-dimethylaminopropane (DLinDMA). Also see for example, U.S. Pat. No. 10,221,127 (incorporated by reference) and Reichmuth A M et al. (Therapeutic Delivery. 2016; 7(5):319-334. DOI: 10.4155/tde-2016-0006). In specific embodiments, the vaccines formulations comprise lipid nanoparticle delivery formulations of SAM RNA vaccines. In specific embodiments, the LNPs comprise an ionizable cationic lipid (phosphatidylcholine:cholesterol/PEG-lipid (50:10:38.5:1.5 mol/mol). In certain embodiments, the RNA to total lipid ratio in the LNP is approximately 0.05 (wt/wt). In certain embodiments, the LNPs have a diameter of ˜80 nm.

[0113] In other embodiments, Charge-Altering Releasable Transporters (CARTs) as a mRNA delivery platform.

[0114] Accordingly, in certain embodiments, the vaccines viral vector-based vaccines or nucleic acid-based vaccines. In specific embodiments, the vaccines are SAM RNA-based vaccines. Optionally, the SAM vaccines are in lipid nanoparticle formulations.

### Method of Vaccination

[0115] Also provided herein is a method of treating, protecting against, and/or preventing disease associated with the infectious agent in a subject in need thereof by administering the vaccine to the subject. For example, a worker skilled in the art would readily appreciate that a SARS-COV-2 vaccine may be used treating, protecting against, and/or preventing disease associated with SARS-COV-2 (i.e. COVID 19). Administration of the vaccine to the subject can induce or elicit a specific immune response against the vaccine target in the subject.

[0116] The subject may be a human or other animals, including but not limited to other mammals, such as non-human primates, cats, dogs, equines (including but not limited to horses, donkeys and zebras), camels, sheep, goats, and bovines (including but not limited to cows).

[0117] The induced immune response can be used to treat, prevent, and/or protect against disease related to the vaccine target. For example, a SARS-COV-2 vaccine to the subject can induce or elicit a specific immune response against the SARS-COV-2 in the subject. The induced immune response provides the subject administered the vaccine with protection against the vaccine target, such as a SARS-COV-2 vaccine provides resistance to SARS-COV-2.

[0118] The induced immune response can include an induced humoral immune response and/or an induced cellular immune response. The induced humoral immune response can include IgG antibodies and/or neutralizing antibodies that are reactive to the antigen. The induced cellular immune response can include a CD8+ T cell response.

[0119] The number of vaccine doses for effective treatment can be 1, 2, 3, 4, 5, 6, 7, 8, 9, or 10.

[0120] In certain embodiments, a single type of vaccine is used. In other embodiments, multiple types of vaccines are used. For example, in certain embodiments, a prime and boost strategy of vaccination is used. In such embodiments, one vaccine expresses epitopes are linked to CD74/HLA targeting sequences is used (this may promote DC cross priming of T cells). A second vaccine expresses epitopes that lack all signal sequences and transmembrane domains is used (this may promote endogenous antigen presentation). These may be administered together or in 2 separate immunization of priming and boosting to promote optimum T cell response.

[0121] The vaccine can be formulated in accordance with standard techniques well known to those skilled in the pharmaceutical art. Such compositions can be administered in dosages and by techniques well known to those skilled in the medical arts taking into consideration such factors as the age, sex, weight, and condition of the particular subject, and the route of administration. The subject can be a mammal, such as a human, an equine, a bovine, a pig, a sheep, a camel, a cat, a dog, a rat, or a mouse.

[0122] The vaccine can be administered prophylactically or therapeutically. In prophylactic administration, the vaccines can be administered in an amount sufficient to induce an immune response. In therapeutic applications, the vaccines are administered to a subject in need thereof in an amount sufficient to elicit a therapeutic effect. An amount adequate to accomplish this is defined as “therapeutically effective dose.” Amounts effective for this use will depend on, e.g., the particular composition of the vaccine regimen administered, the manner of administration, the stage and severity of the disease, the general state of health of the patient, and the judgment of the prescribing physician.

[0123] The vaccine can be administered by methods well known in the art as described in Donnelly et al. (Ann. Rev. Immunol. 15:617-648 (1997)); Felgner et al. (U.S. Pat. No. 5,580,859, issued Dec. 3, 1996); Felgner (U.S. Pat. No. 5,703,055, issued Dec. 30, 1997); and Carson et al. (U.S. Pat. No. 5,679,647, issued Oct. 21, 1997). The nucleic acid of the vaccine can be complexed to particles or beads that can be administered to an individual, for example, using a vaccine gun. One skilled in the art would know that the choice of a pharmaceutically acceptable carrier, including a physiologically acceptable compound, depends, for example, on the route of administration of the expression vector.

[0124] The vaccine can be delivered via a variety of routes. Typical delivery routes include parenteral administration, e.g., intradermal, intramuscular or subcutaneous delivery. Other routes include oral administration, intranasal, and intravaginal routes. The vaccine can be delivered to the interstitial spaces of tissues of an individual (Felgner et al., U.S. Pat. Nos. 5,580,859 and 5,703,055. The vaccine can also be administered to muscle, or can be administered via intradermal or subcutaneous injections, or transdermally, such as by iontophoresis. Epidermal administration of the vaccine can also be employed. Epidermal administration can involve mechanically or chemically irritating the outermost layer of epidermis to stimulate an immune response to the irritant (Carson et al., U.S. Pat. No. 5,679,647, the contents of which are incorporated herein by reference in its entirety).

[0125] The vaccine can also be formulated for administration via the nasal passages. Formulations suitable for nasal administration, wherein the carrier is a solid, can include a coarse powder having a particle size, for example, in the range of about 10 to about 500 microns which is administered in the manner in which snuff is taken, i.e., by rapid inhalation through the nasal passage from a container of the powder held close up to the nose. The formulation can be a nasal spray, nasal drops, or by aerosol administration by nebulizer. The formulation can include aqueous or oily solutions of the vaccine.

[0126] The vaccine can be a liquid preparation such as a suspension, syrup or elixir. The vaccine can also be a preparation for parenteral, subcutaneous, intradermal, intramuscular or intravenous administration (e.g., injectable administration), such as a sterile suspension or emulsion.

[0127] The vaccine can be administered via electroporation, such as by a method described in U.S. Pat. No. 7,664,545. The electroporation can be by a method and/or apparatus described in U.S. Pat. Nos. 6,302,874; 5,676,646; 6,241,701; 6,233,482; 6,216,034; 6,208,893; 6,192,270; 6,181,964; 6,150,148; 6,120,493; 6,096,020; 6,068,650; and 5,702,359. The electroporation may be carried out via a minimally invasive device.

[0128] A method of inducing an antigen-specific immune response in a subject, the method comprising administering to the subject the vaccine comprising at least one nucleic acid sequence of SEQ ID NO. 1-51 or a mutated variant thereof capable of expressing a polypeptide in an amount effective to produce an antigen-specific immune response in the subject.

### EXAMPLES

### Example 1: Identification and Quantification of Peptides Eluted from Hla Molecules from Cultured Cells and from Patient Samples

[0129] Peptide analysis from cultured cells: Peptide epitopes in the SARS-COV-2 proteins will be mapped. Using human THP-1 (monocytic) and Calu-3 (lung epithelial) cells, we will treat them with a recombinant version of each SARS-COV-2 protein. The duration of antigen exposure will be optimized for maximum presentation. After antigen challenge, we will first collect host-processed, HLA-bound peptides from the cells by immunoprecipitation (IP) of the HLA, followed by peptide elution using acid stripping (as performed previously). We will use anti-HLA-A (IgG EP1395Y, Abcam 52922), anti HLA-B (IgG1 JOAN-1, Thermo MA1-35410), and anti-HLA-C (IgG EPR6749, Abcam 126722) antibodies to mmunoprecipitated human HLA I proteins and their ligands. For MHC II, we will use the L243 antibody against HLA-DRB1 (IgG2a, Abcam 136320), or other antibodies against several variants, such as the HL-40 antibody against HLA-DR and -DP (IgG2a, Abcam 8085). The IgG will be conjugated to magnetic Protein G beads and cross-linked with disuccinimidyl suberate so that the IgG is not eluted and the beads can be re-used. Post-challenge, cells will be solubilized in a detergent-containing buffer, and HLA molecules will be immunoprecipitated with the IgG conjugated magnetic beads. HLA-bound peptides will then be eluted in 10% acetic acid, separated from larger proteins by a 5000 molecular weight cutoff filter and then detected by mass spectrometry, as performed previously.

[0130] Peptide analysis from COVID-19 Patient Cohort: Vancouver General Hospital (VGH) and Surrey Memorial Hospital (SMH) receive >70% of SARS-COV-2 patients in British Columbia who require hospitalization. As of Mar. 30, 2020, 56 patients have been enrolled in the two centers (VGH & SMH). Clinical care will be guided by the discretion of attending intensive care physicians in accordance with the international guidelines for COVID-19 management from the Surviving Sepsis Campaign and the British Columbia COVID-19 Therapeutics Committee recommendations. Clinical data include: date of ICU admission, sex, age, symptoms of viral illness, comorbidities, length of ICU and hospital stay, length of mechanical ventilation, development of acute respiratory distress syndrome, medications administered specific to treatment of SARS-COV-2, length of other treatment modalities. PBMCs will be collected on day 14 and day 21. We will experimentally mapping peptide epitopes in the SARS-COV-2 proteins, in a manner similar to the peptide analysis from cultured cells. We will obtain COVID-19 patient peripheral blood mononuclear cells (PBMCs) from the COVID-19 patient cohort in Vancouver. We will elute the HLA-bound SARS-COV-2 peptides from the PBMCs, and map the peptides using Mass Spectrometry.

[0131] HLA haplotype sequencing: In order to begin to understand if some HLA genes confer resistance or susceptibility to SARS-COV-2, as has been noted for other human coronaviruses, we will sequence HLA genes from COVID-19 patients. From the COVID-19 patient PBMC samples, all HLA Class I and Class II HLA genes will be sequenced at single base-pair resolution. 0.6-1.4 μg of high-quality genomic DNA (gDNA) is required for the amplification of HLA-A, HLA-B, HLA-C, HLA-DRB1/3, HLA-DRB4, HLA-DRB5, HLADPA1, HLA-DPB1, HLA-DQA1 and HLA-DQB1 regions. Each patient will be genotyped once. The next generation sequencing tool for HLA typing, Holotype HLA v3.0 (Omixon), is a set of predetermined PCR primers and reagents that provides deep and even coverage of the whole gene region for all 11 HLA class 1 and class 2 genes, with balance between alleles at the same locus. Targeted whole gene libraries will be multiplexed and sequenced on the II lumina MiSeq platform using the 300-cycle Standard flow cell. Data Analysis of fastq files will be done using the Omixon Twin v4.0.1 Software. Polymorphic sites will be identified within all the regions.

### Example 2: Creation of Hla Tetramers for Use in Vaccine Testing and Evaluation of Patient Immune Status

[0132] HLA tetramers are essentially four HLA molecules together in a tetramer, such that their peptide-binding pockets are exposed. Specific kits for making tetramers with specific HLA haplotypes will be purchased from Mbl International Corp, i.e. QuickSwitch Quant HLA-A*02:01 Tetramer Kit-APC (#TB-7300-K2). These HLA tetramer molecules can then be loaded with a relevant peptide, identified by the studies above. In a tetramer assay, these HLA-tetramers are used to detect T cell with receptors that recognize the peptide:HLA complex. The HLA tetramers are further labeled with a fluorophore (Tetramer Staining Guide, MBL Int. Corp.), allowing tetramer-bound T-cells to be analyzed with flow cytometry. This enables us to quantitate and to investigate the specificity and functionality of the cellular immune response to a SARS-COV-2 viral infection and to an eventual vaccine administration, as HLA tetramer binding to a T cell indicates that a person has encountered the pathogen previously and built an immune response to that pathogen. Mapping HLA-peptide epitopes of SARS-COV-2 proteins will allow generation of HLA Tetramers, which can then be used to quantify T cell specificity in human populations. A tetramer reagent such as this would be invaluable for monitoring patients' immune responses in real time and may inform clinical treatment and vaccine performance.

### Example 3: Creation of “String-of-Beads” Vaccines for Covid-19

[0133] Self-Amplifying mRNA (SAM) Vaccines production: | “String-of-Beads” SAM candidates vaccines will be produced asdescribed above.

[0134] Lipid nanoparticle (LNP) formulation of the RNA-based vaccines: SAM vaccine candidates will be encapsulated state-of-the-art lipid nanoparticles based on clinically approved formulations. Encapsulation uses a self-assembly process, in which an aqueous solution of mRNA at pH=4.0 is rapidly mixed with a solution of lipids dissolved in ethanol. LNPs to be used in this study are similar in composition to those described previously, which contain an ionizable cationic lipid (phosphatidylcholine:cholesterol/PEG-lipid (50:10:38.5:1.5 mol/mol)) and will be encapsulated at an RNA to total lipid ratio of ˜0.05 (wt/wt). This should result in LNPs with a diameter of ˜80 nm as measured by dynamic light scattering using a Zetasizer Nano ZS (Malvern Instruments Ltd., Malvern, UK) instrument. All SAM-LNP formulations will be stored at −80° ° C. at a concentration of mRNA of ˜1 μg/μl.

[0135] Validation of recombinant gene and protein expression: Human HEK293 cell and hamster BHK-21 cells will be transfected with the SAM-lipid nanoparticle formulations. RT-PCR and Western blots will be used to test for expression of the constructs from the vaccine candidates. Cell lysates will be run on SDS-PAGE gels and Western blots will be performed with FLAG-specific antibodies.

[0136] Testing vaccines in a hamster COVID-19 disease model. The SAM-lipid nanoparticle (SAM-LNP) vaccines will be tested in a hamster model of COVID-19. Vaccine constructs will be tested for their performance in evoking immune responses against the SARS-COV-2 spike protein and to elicit protection in a SARS-COV-2 lethal viral challenge model in Syrian hamsters.

[0137] Hamster Vaccination: SAM-LNPs vaccine candidates will be diluted in phosphate-buffered saline (PBS) and injected into animals intramuscularly (i.m.) with a 3/10 cc 29½G insulin syringe. Four sites of injection (30 μl each) over the lower back will be used. For a dose response curve, hamsters will be vaccinated (Primed) on day 0 and receive a booster injection on day 14. Groups will consist of a minimum of 5 animals per group for each vaccine tested, and a minimum of 3 dose ranges (e.g. 0.005 mg/kg-0.250 mg/kg) will be used for each vaccine23. A control group of unimmunized hamsters will be included. Body weights will be determined every day.

[0138] Measuring Cellular Immune Responses: Peripheral blood monocytic cells (PBMCs) will be obtained on day 0, 7, 14 and 28 post-infection. We will harvest PBMCs to compare lymphocyte populations (T cell: CD4+, CD8+; B cell) using hamster-specific antibodies available from the Monoclonal Antibody Center at Washington State University. Inflammatory cytokines profiling will be undertaken using ELISA kits (MBL Intl) in samples collected at day 0, 4, 7, 14, 28 after challenge. Quantitative reverse transcriptase polymerase chain reaction (qRT-PCR) will also be used to verify cytokine production from isolated cells and tissues, as previously described. Using blood obtained from the vaccinated hamsters above, we will screen for the production of antibodies which bind to recombinant SARS-COV-2 proteins, using screening assays, e.g. Western blot; ELISA assay; EliSpot.

[0139] Viral Challenge: The optimal dose of vaccine to use will be determined from the dose response trial. Hamsters will be vaccinated (Primed) on day 0 and receive a booster injection on day 14. Groups will consist of a minimum of 15 animals per group for each vaccine tested. At 28 days post vaccination, hamsters will be challenged with SARS-COV-2 at a dose of 10 e5 pfu in roughly 30 μl PBS via intranasal administration. Hamsters will be monitored every day for temperature, weight, and survival. Losing over 20% of their body weight will be considered a humane endpoint, and animals will be sacrificed. Tissues and cells will be harvested and examined, as described above, and bronchoalveolar lavage cell suspension will also be obtained at time of mortality.

### Example 4: Combinatorially Identified Epitopes and Experimental Data

[0140] There appears to be a good concordance between the epitopes identified by the method described in PCT/CA2021/051666 (incorporated by reference) and those found experimentally in infection survivors. With typical parameters, the method described in PCT/CA2021/051666 would identify 251 highly immunogenic loci that are needed to confer a broad population-wide immunity against SARS-CoV-2, and 113 of those (or the 63% of the 180 detected ones) correspond with peptides that have been identified in survivors. It should also be noted that the dataset of detected peptides is by no means exhaustive as it is derived from a sample of survivors that is not representative of the general population, so more of the peptides predicted by PCT/CA2021/0516 might in fact be present in the general population. A pre-gene breakdown of the results is included in the following Table.

| | Predicted by | Not predicted by | Predicted by | |
|---|---|---|---|---|
| | PCT/ | PCT/ | PCT/ | |
| | CA2021/ | CA2021/ | CA2021/ | |
| | 051666 | 051666 | 051666 | |
| | and | and | and not | |
| | experim. | experim. | experim. | |
| Gene | detected | detected | detected | TOTAL |
| surface_glycoprotein | 26 | 7 | 13 | 46 |
| | (57% of total, | (15% of total, | (28% of total) | |
| | 79% of detected) | 21% of detected) | | |
| nucleocapsid_phosphoprotein | 7 | 7 | 2 | 16 |
| | (44% of total. | (44% of total, | (13% of total) | |
| | 50% of detected) | 50% of detected) | | |
| nsp6 | 5 | 1 | 0 | 6 |
| | (83% of total, | (17% of total, | (0% of total) | |
| | 83% of detected) | 17% of detected) | | |
| membrane_glycoprotein | 4 | 2 | 1 | 7 |
| | (57% of total, | (29% of total, | (14% of total) | |
| | 67% of detected) | 33% of detected) | | |
| ORF3a_protein | 4 | 1 | 2 | 7 |
| | (57% of total, | (14% of total, | | |
| | 80% of detected) | 20% of detected) | (29% of total) | |
| 3′-to-5′_exonuclease | 9 | 4 | 5 | 18 |
| | (50% of total, | (22% of total, | (28% of total) | |
| | 69% of detected) | 31% of detected) | | |
| RNA-dependent_RNA_polymerase | 18 | 7 | 10 | 35 |
| | (51% of total, | (20% of total, | (29% of total) | |
| | 72% of detected) | 28% of detected) | | |
| ORF8_protein | 3 | 0 | 1 | 4 |
| | (75% of total, | (0% of total, | (25% of total) | |
| | 100% of detected) | 0% of detected) | | |
| nsp2 | 11 | 7 | 7 | 25 |
| | (44% of total, | (28% of total, | (28% of total) | |
| | 61% of detected) | 39% of detected) | | |
| helicase | 8 | 2 | 8 | 18 |
| | (44% of total, | (11% of total, | (44% of total) | |
| | 80% of detected) | 20% of detected) | | |
| nsp3 | 18 | 29 | 22 | 69 |
| | (26% of total, | (42% of total, | (32% of total) | |
| | 38% of detected) | 62% of detected) | | |
| TOTAL | 113 | 67 | 71 | 251 |
| | (45% of total, | (27% of total, | (28% of total) | |
| | 63% of detected) | 37% of detected) | | |

[0141] In more detail, this is the full list of viral loci, with whether they have been predicted/detected:

| | | | Identification |
|---|---|---|---|
| | | | (J = PCT/ |
| | | | CA2021/ |
| | | | 051666; |
| | | | E = |
| | | | experimentally |
| | Low | High | detected |
| | AA | AA | peptides; |
| Viral gene | position | position | J, E = both) |
| 3′-to-5′_exonuclease | 1 | 14 | J, E |
| 3′-to-5′_exonuclease | 16 | 30 | J |
| 3′-to-5′_exonuclease | 64 | 72 | E |
| 3′-to-5′_exonuclease | 102 | 125 | J, E |
| 3′-to-5′_exonuclease | 156 | 199 | J, E |
| 3′-to-5′_exonuclease | 205 | 219 | J |
| 3′-to-5′_exonuclease | 223 | 237 | J |
| 3′-to-5′_exonuclease | 240 | 249 | E |
| 3′-to-5′_exonuclease | 252 | 291 | J, E |
| 3′-to-5′_exonuclease | 305 | 319 | J |
| 3′-to-5′_exonuclease | 320 | 328 | E |
| 3′-to-5′_exonuclease | 337 | 351 | J, E |
| 3′-to-5′_exonuclease | 363 | 381 | J, E |
| 3′-to-5′_exonuclease | 394 | 409 | J |
| 3′-to-5′_exonuclease | 411 | 419 | E |
| 3′-to-5′_exonuclease | 428 | 450 | J, E |
| 3′-to-5′_exonuclease | 454 | 476 | J, E |
| 3′-to-5′_exonuclease | 492 | 512 | J, E |
| helicase | 1 | 39 | J, E |
| helicase | 41 | 92 | J, E |
| helicase | 128 | 135 | J |
| helicase | 146 | 169 | J, E |
| helicase | 173 | 181 | E |
| helicase | 205 | 213 | J |
| helicase | 218 | 270 | J, E |
| helicase | 289 | 375 | J, E |
| helicase | 382 | 390 | J |
| helicase | 392 | 411 | J, E |
| helicase | 422 | 430 | J |
| helicase | 438 | 447 | J |
| helicase | 448 | 456 | E |
| helicase | 478 | 487 | J |
| helicase | 492 | 499 | J |
| helicase | 507 | 533 | J, E |
| helicase | 566 | 579 | J |
| helicase | 582 | 600 | J, E |
| membrane_glycoprotein | 19 | 73 | J, E |
| membrane_glycoprotein | 82 | 116 | J, E |
| membrane_glycoprotein | 119 | 132 | J |
| membrane_glycoprotein | 136 | 159 | J, E |
| membrane_glycoprotein | 161 | 196 | J, E |
| membrane_glycoprotein | 198 | 206 | E |
| membrane_glycoprotein | 213 | 22 | E |
| nsp2 | 14 | 24 | J, E |
| nsp2 | 30 | 49 | J, E |
| nsp2 | 61 | 81 | J, E |
| nsp2 | 86 | 108 | J, E |
| nsp2 | 112 | 120 | E |
| nsp2 | 121 | 129 | J |
| nsp2 | 156 | 163 | J |
| nsp2 | 178 | 198 | J, E |
| nsp2 | 199 | 207 | J, E |
| nsp2 | 216 | 224 | E |
| nsp2 | 239 | 248 | J |
| nsp2 | 265 | 273 | E |
| nsp2 | 288 | 326 | J, E |
| nsp2 | 347 | 367 | J |
| nsp2 | 382 | 401 | J |
| nsp2 | 403 | 412 | E |
| nsp2 | 413 | 420 | J |
| nsp2 | 429 | 450 | J, E |
| nsp2 | 461 | 487 | J, E |
| nsp2 | 492 | 513 | J, E |
| nsp2 | 522 | 536 | J, E |
| nsp2 | 551 | 559 | E |
| nsp2 | 561 | 569 | E |
| nsp2 | 598 | 610 | J |
| nsp2 | 625 | 636 | E |
| nsp3 | 1 | 27 | J, E |
| nsp3 | 42 | 50 | E |
| nsp3 | 53 | 68 | J, E |
| nsp3 | 81 | 105 | J, E |
| nsp3 | 182 | 201 | E |
| nsp3 | 239 | 249 | J |
| nsp3 | 265 | 273 | E |
| nsp3 | 325 | 338 | E |
| nsp3 | 339 | 348 | J |
| nsp3 | 351 | 364 | J, E |
| nsp3 | 367 | 375 | E |
| nsp3 | 396 | 404 | E |
| nsp3 | 415 | 424 | J |
| nsp3 | 430 | 452 | J, E |
| nsp3 | 454 | 476 | J, E |
| nsp3 | 494 | 502 | E |
| nsp3 | 503 | 511 | E |
| nsp3 | 525 | 542 | J |
| nsp3 | 569 | 579 | J, E |
| nsp3 | 595 | 608 | J |
| nsp3 | 615 | 627 | E |
| nsp3 | 628 | 639 | J |
| nsp3 | 647 | 655 | E |
| nsp3 | 660 | 671 | J |
| nsp3 | 684 | 691 | J |
| nsp3 | 718 | 728 | E |
| nsp3 | 733 | 741 | E |
| nsp3 | 748 | 756 | E |
| nsp3 | 810 | 817 | J |
| nsp3 | 819 | 832 | J, E |
| nsp3 | 851 | 859 | E |
| nsp3 | 867 | 882 | J |
| nsp3 | 890 | 904 | J, E |
| nsp3 | 950 | 958 | E |
| nsp3 | 963 | 973 | J |
| nsp3 | 980 | 994 | J, E |
| nsp3 | 995 | 1006 | J |
| nsp3 | 1012 | 1021 | J |
| nsp3 | 1073 | 1089 | E |
| nsp3 | 1112 | 1120 | E |
| nsp3 | 1131 | 1161 | J, E |
| nsp3 | 1165 | 1176 | J |
| nsp3 | 1199 | 1207 | E |
| nsp3 | 1236 | 1268 | J, E |
| nsp3 | 1274 | 1289 | E |
| nsp3 | 1291 | 1299 | E |
| nsp3 | 1303 | 1312 | E |
| nsp3 | 1327 | 1335 | E |
| nsp3 | 1342 | 1359 | J, E |
| nsp3 | 1383 | 1400 | J, E |
| nsp3 | 1404 | 1432 | E |
| nsp3 | 1452 | 1481 | J, E |
| nsp3 | 1483 | 1494 | J |
| nsp3 | 1508 | 1523 | E |
| nsp3 | 1529 | 1565 | E |
| nsp3 | 1574 | 1582 | E |
| nsp3 | 1587 | 1595 | E |
| nsp3 | 1626 | 1645 | J |
| nsp3 | 1652 | 1659 | J |
| nsp3 | 1665 | 1673 | E |
| nsp3 | 1697 | 1706 | J |
| nsp3 | 1718 | 1725 | J |
| nsp3 | 1737 | 1759 | J, E |
| nsp3 | 1771 | 1794 | E |
| nsp3 | 1809 | 1819 | J, E |
| nsp3 | 1830 | 1843 | J |
| nsp3 | 1866 | 1881 | J, E |
| nsp3 | 1885 | 1897 | J |
| nsp3 | 1923 | 1942 | J |
| nsp6 | 5 | 13 | E |
| nsp6 | 24 | 124 | J, E |
| nsp6 | 139 | 155 | J, E |
| nsp6 | 160 | 234 | J, E |
| nsp6 | 236 | 249 | J, E |
| nsp6 | 268 | 286 | J, E |
| nucleocapsid_phosphoprotein | 11 | 19 | J, E |
| nucleocapsid_phosphoprotein | 41 | 59 | J, E |
| nucleocapsid_phosphoprotein | 75 | 87 | E |
| nucleocapsid_phosphoprotein | 93 | 101 | E |
| nucleocapsid_phosphoprotein | 104 | 115 | J, E |
| nucleocapsid_phosphoprotein | 128 | 136 | J |
| nucleocapsid_phosphoprotein | 138 | 146 | E |
| nucleocapsid_phosphoprotein | 150 | 158 | E |
| nucleocapsid_phosphoprotein | 189 | 196 | E |
| nucleocapsid_phosphoprotein | 217 | 234 | J, E |
| nucleocapsid_phosphoprotein | 257 | 265 | E |
| nucleocapsid_phosphoprotein | 266 | 274 | J, E |
| nucleocapsid_phosphoprotein | 289 | 298 | E |
| nucleocapsid_phosphoprotein | 299 | 316 | J, E |
| nucleocapsid_phosphoprotein | 323 | 369 | J, E |
| nucleocapsid_phosphoprotein | 375 | 386 | J |
| ORF3a_protein | 2 | 10 | E |
| ORF3a_protein | 25 | 65 | J, E |
| ORF3a_protein | 70 | 134 | J, E |
| ORF3a_protein | 136 | 175 | J, E |
| ORF3a_protein | 176 | 188 | J |
| ORF3a_protein | 194 | 249 | J, E |
| ORF3a_protein | 252 | 262 | J |
| ORF8_protein | 6 | 52 | J, E |
| ORF8_protein | 54 | 64 | J |
| ORF8_protein | 73 | 93 | J, E |
| ORF8_protein | 95 | 118 | J, E |
| RNA-dependent_RNA_polymerase | 4 | 20 | J |
| RNA-dependent_RNA_polymerase | 28 | 35 | J |
| RNA-dependent_RNA_polymerase | 64 | 74 | J, E |
| RNA-dependent_RNA_polymerase | 83 | 104 | J, E |
| RNA-dependent_RNA_polymerase | 122 | 133 | J, E |
| RNA-dependent_RNA_polymerase | 142 | 155 | J |
| RNA-dependent_RNA_polymerase | 183 | 196 | J |
| RNA-dependent_RNA_polymerase | 229 | 256 | J, E |
| RNA-dependent_RNA_polymerase | 263 | 271 | E |
| RNA-dependent_RNA_polymerase | 295 | 329 | J, E |
| RNA-dependent_RNA_polymerase | 331 | 346 | J, E |
| RNA-dependent_RNA_polymerase | 348 | 363 | J |
| RNA-dependent_RNA_polymerase | 365 | 382 | J, E |
| RNA-dependent_RNA_polymerase | 394 | 410 | J, E |
| RNA-dependent_RNA_polymerase | 420 | 427 | J |
| RNA-dependent_RNA_polymerase | 434 | 443 | J |
| RNA-dependent_RNA_polymerase | 450 | 487 | J, E |
| RNA-dependent_RNA_polymerase | 523 | 530 | J |
| RNA-dependent_RNA_polymerase | 536 | 548 | E |
| RNA-dependent_RNA_polymerase | 557 | 564 | J |
| RNA-dependent_RNA_polymerase | 574 | 589 | E |
| RNA-dependent_RNA_polymerase | 603 | 618 | J, E |
| RNA-dependent_RNA_polymerase | 624 | 678 | J, E |
| RNA-dependent_RNA_polymerase | 681 | 689 | E |
| RNA-dependent_RNA_polymerase | 691 | 708 | J, E |
| RNA-dependent_RNA_polymerase | 717 | 734 | J |
| RNA-dependent_RNA_polymerase | 738 | 752 | J, E |
| RNA-dependent_RNA_polymerase | 754 | 766 | J, E |
| RNA-dependent_RNA_polymerase | 771 | 792 | J, E |
| RNA-dependent_RNA_polymerase | 793 | 801 | E |
| RNA-dependent_RNA_polymerase | 810 | 845 | J, E |
| RNA-dependent_RNA_polymerase | 854 | 871 | J, E |
| RNA-dependent_RNA_polymerase | 877 | 893 | J, E |
| RNA-dependent_RNA_polymerase | 895 | 915 | E |
| RNA-dependent_RNA_polymerase | 926 | 932 | E |
| surface_glycoprotein | 2 | 19 | J, E |
| surface_glycoprotein | 24 | 36 | E |
| surface_glycoprotein | 38 | 54 | J, E |
| surface_glycoprotein | 55 | 74 | J, E |
| surface_glycoprotein | 78 | 93 | J |
| surface_glycoprotein | 109 | 117 | E |
| surface_glycoprotein | 123 | 146 | J |
| surface_glycoprotein | 151 | 160 | E |
| surface_glycoprotein | 162 | 179 | J, E |
| surface_glycoprotein | 202 | 250 | J, E |
| surface_glycoprotein | 256 | 278 | J, E |
| surface_glycoprotein | 286 | 293 | J |
| surface_glycoprotein | 298 | 311 | J |
| surface_glycoprotein | 318 | 337 | J, E |
| surface_glycoprotein | 343 | 382 | J, E |
| surface_glycoprotein | 387 | 404 | J |
| surface_glycoprotein | 411 | 419 | E |
| surface_glycoprotein | 424 | 436 | J, E |
| surface_glycoprotein | 445 | 459 | E |
| surface_glycoprotein | 463 | 528 | J, E |
| surface_glycoprotein | 582 | 600 | J |
| surface_glycoprotein | 601 | 629 | J, E |
| surface_glycoprotein | 635 | 654 | J, E |
| surface_glycoprotein | 657 | 671 | E |
| surface_glycoprotein | 680 | 706 | J, E |
| surface_glycoprotein | 710 | 733 | J, E |
| surface_glycoprotein | 735 | 742 | J |
| surface_glycoprotein | 746 | 767 | J, E |
| surface_glycoprotein | 780 | 794 | J, E |
| surface_glycoprotein | 801 | 815 | J, E |
| surface_glycoprotein | 821 | 829 | E |
| surface_glycoprotein | 835 | 844 | J |
| surface_glycoprotein | 846 | 855 | J |
| surface_glycoprotein | 857 | 881 | J, E |
| surface_glycoprotein | 882 | 906 | J, E |
| surface_glycoprotein | 912 | 927 | J, E |
| surface_glycoprotein | 928 | 955 | J, E |
| surface_glycoprotein | 958 | 1016 | J, E |
| surface_glycoprotein | 1039 | 1071 | J, E |
| surface_glycoprotein | 1082 | 1092 | J |
| surface_glycoprotein | 1096 | 1133 | J, E |
| surface_glycoprotein | 1138 | 1145 | J |
| surface_glycoprotein | 1152 | 1160 | J |
| surface_glycoprotein | 1183 | 1203 | J, E |
| surface_glycoprotein | 1208 | 1262 | J, E |
| surface_glycoprotein | 1263 | 1270 | J |

[0142] It should also be noted that, according to the contents of the current invention and depending on the viral gene, the method described in PCT/CA2021/0516 was used to predict peptides coming from both the wild-type virus and from variants. A table detailing the viral loci, the corresponding number of wild-type and variant peptides, and the corresponding number of HLA I & II alleles that are expected to be protected by these specific sets of peptides, is enclosed below.

| | # | # alleles | # peptides | # alleles |
|---|---|---|---|---|
| | wild-type | protected | from | protected |
| Gene | peptides | by w.t.p. | variants | by p.f.v. |
| surface_glycoprotein | 30 | 122 | 80 | 122 |
| nucleocapsid_ | 3 | 99 | 16 | 103 |
| phosphoprotein | | | | |
| nsp6 | 2 | 69 | 23 | 122 |
| endoRNAse | 10 | 85 | — | — |
| nsp7 | 2 | 54 | — | — |
| 3C-like_proteinase | 8 | 96 | — | — |
| nsp8 | 7 | 110 | — | — |
| membrane_glycoprotein | 5 | 108 | 11 | 122 |
| nsp9 | 4 | 77 | — | — |
| ORF3a_protein | 6 | 90 | 44 | 122 |
| nsp10 | 4 | 84 | — | — |
| leader_protein | 3 | 100 | — | — |
| 3′-to-5′_exonuclease | 17 | 122 | — | — |
| RNA-dependent_ | 22 | 122 | 34 | 122 |
| RNA_polymerase | | | | |
| ORF8_protein | 3 | 86 | 11 | 115 |
| ORF6_protein | 3 | 103 | — | — |
| 2′-O-ribose_ | 8 | 110 | — | — |
| methyltransferase | | | | |
| ORF7a_protein | 3 | 91 | — | — |
| nsp2 | 18 | 122 | — | — |
| envelope_protein | 1 | 81 | — | — |
| nsp3 | 41 | 119 | — | — |
| helicase | 14 | 122 | 38 | 122 |
| nsp4 | 10 | 106 | — | — |

[0143] Although various embodiments of the invention are disclosed herein, many adaptations and modifications may be made within the scope of the invention in accordance with the common general knowledge of those skilled in this art. Such modifications include the substitution of known equivalents for any aspect of the invention in order to achieve the same result in substantially the same way. Numeric ranges are inclusive of the numbers defining the range. The word “comprising” is used herein as an open ended term, substantially equivalent to the phrase “including, but not limited to”, and the word “comprises” has a corresponding meaning. As used herein, the singular forms “a”, “an” and “the” include plural referents unless the context clearly dictates otherwise. Thus, for example, reference to “a thing” includes more than one such thing. Citation of references herein is not an admission that such references are prior art to an embodiment of the present invention. The invention includes all embodiments and variations substantially as hereinbefore described and with reference to the examples and drawings. Titles, headings, or the like are provided to enhance the reader's comprehension of this document, and should not be read as limiting the scope of the present invention.

We claim:

1. A vaccine comprising or capable of expressing one or more concatemers of epitopes from a viral pathogen; such as a sarbecovirus pathogen, said vaccine optionally further comprising an adjuvant.

2. The vaccine of claim 1, wherein said vaccine comprises or expresses epitopes for all MHC I and MHC II alleles with a frequency >1% in the target population; optionally the population is a geographically restricted population and optionally epitopes that bind MHC I or MHC II alleles associated with autoimmune disease are excluded.

3. (canceled)

4. (canceled)

5. The vaccine of claim 1, wherein at least a portion of said epitopes are from conserved proteins from said viral pathogen, are universal (common) epitopes of said viral pathogen or variant specific epitopes.

6. (canceled)

7. (canceled)

8. The vaccine of claim 1, wherein a linker separates each of said epitopes.

9. (canceled)

10. The vaccine of claim 1, wherein at least one of the one or more epitopes is as set forth in SEQ ID NOs 1-789 or set forth in SEQ ID NOs 798-851.

11. A vaccine comprising or capable of expressing one or more concatemers of epitopes set forth in SEQ ID NOs 1-789 or SEQ ID NOs 798-851.

12. (canceled)

13. The vaccine of claim 1, wherein said vaccine is a viral vector-based vaccine.

14. The vaccine of claim 13, wherein the viral vector is an adenoviral vector, a vesicular stomatitis virus vector or a vaccinia vector.

15. The vaccine of claim 1, wherein said vaccine is a nucleic acid-based vaccine.

16. The vaccine of claim 15, wherein said vaccine is a SAM RNA-based vaccine.

17. The vaccine of claim 16, wherein said SAM RNA-based vaccine is encapsulated in a lipid nanoparticle (LNP).

18. The vaccine of claim 17, wherein the LNP comprises a cationic lipid.

19. The vaccine of claim 17, wherein the LNP comprises phosphatidylcholine/cholesterol/PEG-lipid, C12-200, dimethyldioctadecylammonium (DDA), 1,2-dioleoyl-3-trimethylammonium propane (DOTAP) or 1,2-dilinoleyloxy-3-dimethylaminopropane (DLinDMA).

20. (canceled)

21. A method of treating, protecting against, and/or preventing infection by a target viral pathogen or generating an immune response against said target viral pathogen in a subject in need thereof, said method comprising administering one or more of the vaccines of claim 1 to the subject, wherein optionally said viral pathogen is a sarbecovirus such as SARS-COV-2.

22. (canceled)

23. The method of claim 1, wherein said vaccine is administered more than once, optionally wherein a prime and boost strategy of vaccination is utilized.

24. (canceled)

25. The method of claim 21, wherein the subject is a mammal, optionally a human, a cat, dog, horse, sheep, goat, camel or cow.

26. (canceled)

27. (canceled)

28. (canceled)

29. (canceled)

The application's sequence listing, which the Patent Office published only in electronic form, follows.

SEQUENCE LISTING (851 sequences)

SEQ ID NO: 1 - protein, 27 aa, Artificial Sequence
  SARS-CoV-2 Epitope
AKYTQLCQYLNTLTLAVPYNMRVIHFG

SEQ ID NO: 2 - protein, 8 aa, Artificial Sequence
  SARS-CoV-2 Epitope
GYVMHANY

SEQ ID NO: 3 - protein, 10 aa, Artificial Sequence
  SARS-CoV-2 Epitope
IGDCATVHTA

SEQ ID NO: 4 - protein, 9 aa, Artificial Sequence
  SARS-CoV-2 Epitope
IQLSSYSLF

SEQ ID NO: 5 - protein, 13 aa, Artificial Sequence
  SARS-CoV-2 Epitope
KLALGGSVAIKIT

SEQ ID NO: 6 - protein, 11 aa, Artificial Sequence
  SARS-CoV-2 Epitope
SEAFLIGCNYL

SEQ ID NO: 7 - protein, 8 aa, Artificial Sequence
  SARS-CoV-2 Epitope
DCATVHTA

SEQ ID NO: 8 - protein, 10 aa, Artificial Sequence
  SARS-CoV-2 Epitope
DGYVMHANYI

SEQ ID NO: 9 - protein, 9 aa, Artificial Sequence
  SARS-CoV-2 Epitope
KFPLKLRGT

SEQ ID NO: 10 - protein, 9 aa, Artificial Sequence
  SARS-CoV-2 Epitope
SEAFLIGCN

SEQ ID NO: 11 - protein, 10 aa, Artificial Sequence
  SARS-CoV-2 Epitope
CPRHVICTSE

SEQ ID NO: 12 - protein, 14 aa, Artificial Sequence
  SARS-CoV-2 Epitope
DYDCVSFCYMHHME

SEQ ID NO: 13 - protein, 10 aa, Artificial Sequence
  SARS-CoV-2 Epitope
FDVVRQCSGV

SEQ ID NO: 14 - protein, 16 aa, Artificial Sequence
  SARS-CoV-2 Epitope
NFLVQAGNVQLRVIGH

SEQ ID NO: 15 - protein, 8 aa, Artificial Sequence
  SARS-CoV-2 Epitope
TFSVLACY

SEQ ID NO: 16 - protein, 12 aa, Artificial Sequence
  SARS-CoV-2 Epitope
TVNVLAWLYAAV

SEQ ID NO: 17 - protein, 13 aa, Artificial Sequence
  SARS-CoV-2 Epitope
VEGCMVQVTCGTT

SEQ ID NO: 18 - protein, 33 aa, Artificial Sequence
  SARS-CoV-2 Epitope
YEPLTQDHVDILGPLSAQTGIAVLDMCASLKEL

SEQ ID NO: 19 - protein, 8 aa, Artificial Sequence
  SARS-CoV-2 Epitope
AWLYAAVI

SEQ ID NO: 20 - protein, 8 aa, Artificial Sequence
  SARS-CoV-2 Epitope
GSCGSVGF

SEQ ID NO: 21 - protein, 8 aa, Artificial Sequence
  SARS-CoV-2 Epitope
VQLRVIGH

SEQ ID NO: 22 - protein, 11 aa, Artificial Sequence
  SARS-CoV-2 Epitope
YCPRHVICTSE

SEQ ID NO: 23 - protein, 20 aa, Artificial Sequence
  SARS-CoV-2 Epitope
ANSIVCRFDTRVLSNLNLPG

SEQ ID NO: 24 - protein, 30 aa, Artificial Sequence
  SARS-CoV-2 Epitope
CQVHGNAHVASCDAIMTRCLAVHECFVKRV

SEQ ID NO: 25 - protein, 10 aa, Artificial Sequence
  SARS-CoV-2 Epitope
FDVEGCHATR

SEQ ID NO: 26 - protein, 10 aa, Artificial Sequence
  SARS-CoV-2 Epitope
FKHLIPLMYK

SEQ ID NO: 27 - protein, 10 aa, Artificial Sequence
  SARS-CoV-2 Epitope
GTNLPLQLGF

SEQ ID NO: 28 - protein, 11 aa, Artificial Sequence
  SARS-CoV-2 Epitope
IEELFYSYATH

SEQ ID NO: 29 - protein, 44 aa, Artificial Sequence
  SARS-CoV-2 Epitope
KSAFVNLKQLPFFYYSDSPCESHGKQVVSDIDYVPLKSATCITR

SEQ ID NO: 30 - protein, 27 aa, Artificial Sequence
  SARS-CoV-2 Epitope
NAACRKVQHMVVKAALLADKFPVLHDI

SEQ ID NO: 31 - protein, 13 aa, Artificial Sequence
  SARS-CoV-2 Epitope
RTCCLCDRRATCF

SEQ ID NO: 32 - protein, 8 aa, Artificial Sequence
  SARS-CoV-2 Epitope
SLWVYKQF

SEQ ID NO: 33 - protein, 15 aa, Artificial Sequence
  SARS-CoV-2 Epitope
TYACWHHSIGFDYVY

SEQ ID NO: 34 - protein, 27 aa, Artificial Sequence
  SARS-CoV-2 Epitope
VTGLFKDCSKVITGLHPTQAPTHLSVD

SEQ ID NO: 35 - protein, 14 aa, Artificial Sequence
  SARS-CoV-2 Epitope
WNVVRIKIVQMLSD

SEQ ID NO: 36 - protein, 9 aa, Artificial Sequence
  SARS-CoV-2 Epitope
AGFSLWVYK

SEQ ID NO: 37 - protein, 13 aa, Artificial Sequence
  SARS-CoV-2 Epitope
AIKCVPQADVEWK

SEQ ID NO: 38 - protein, 16 aa, Artificial Sequence
  SARS-CoV-2 Epitope
ANSIVCRFDTRVLSNL

SEQ ID NO: 39 - protein, 11 aa, Artificial Sequence
  SARS-CoV-2 Epitope
AVHECFVKRVD

SEQ ID NO: 40 - protein, 19 aa, Artificial Sequence
  SARS-CoV-2 Epitope
DKSAFVNLKQLPFFYYSDS

SEQ ID NO: 41 - protein, 13 aa, Artificial Sequence
  SARS-CoV-2 Epitope
GVNLVAVPTGYVD

SEQ ID NO: 42 - protein, 15 aa, Artificial Sequence
  SARS-CoV-2 Epitope
INAACRKVQHMVVKA

SEQ ID NO: 43 - protein, 23 aa, Artificial Sequence
  SARS-CoV-2 Epitope
NHDLYCQVHGNAHVASCDAIMTR

SEQ ID NO: 44 - protein, 15 aa, Artificial Sequence
  SARS-CoV-2 Epitope
RTCCLCDRRATCFST

SEQ ID NO: 45 - protein, 14 aa, Artificial Sequence
  SARS-CoV-2 Epitope
SDRVVFVLWAHGFE

SEQ ID NO: 46 - protein, 23 aa, Artificial Sequence
  SARS-CoV-2 Epitope
SHGKQVVSDIDYVPLKSATCITR

SEQ ID NO: 47 - protein, 16 aa, Artificial Sequence
  SARS-CoV-2 Epitope
TGLHPTQAPTHLSVDT

SEQ ID NO: 48 - protein, 10 aa, Artificial Sequence
  SARS-CoV-2 Epitope
VTGLFKDCSK

SEQ ID NO: 49 - protein, 13 aa, Artificial Sequence
  SARS-CoV-2 Epitope
WNVVRIKIVQMLS

SEQ ID NO: 50 - protein, 8 aa, Artificial Sequence
  SARS-CoV-2 Epitope
EHIVYGDF

SEQ ID NO: 51 - protein, 11 aa, Artificial Sequence
  SARS-CoV-2 Epitope
ETICAPLTVFF

SEQ ID NO: 52 - protein, 23 aa, Artificial Sequence
  SARS-CoV-2 Epitope
GEAVKTQFNYYKKVDGVVQQLPE

SEQ ID NO: 53 - protein, 10 aa, Artificial Sequence
  SARS-CoV-2 Epitope
GEVPVSIINN

SEQ ID NO: 54 - protein, 18 aa, Artificial Sequence
  SARS-CoV-2 Epitope
KILNNLGVDIAANTVIWD

SEQ ID NO: 55 - protein, 11 aa, Artificial Sequence
  SARS-CoV-2 Epitope
TEISFMLWCKD

SEQ ID NO: 56 - protein, 11 aa, Artificial Sequence
  SARS-CoV-2 Epitope
TKVDGVDVELF

SEQ ID NO: 57 - protein, 8 aa, Artificial Sequence
  SARS-CoV-2 Epitope
VAFNVVNK

SEQ ID NO: 58 - protein, 9 aa, Artificial Sequence
  SARS-CoV-2 Epitope
FEHIVYGDF

SEQ ID NO: 59 - protein, 11 aa, Artificial Sequence
  SARS-CoV-2 Epitope
GEVPVSIINNT

SEQ ID NO: 60 - protein, 9 aa, Artificial Sequence
  SARS-CoV-2 Epitope
GVVQQLPET

SEQ ID NO: 61 - protein, 8 aa, Artificial Sequence
  SARS-CoV-2 Epitope
IAANTVIW

SEQ ID NO: 62 - protein, 10 aa, Artificial Sequence
  SARS-CoV-2 Epitope
NVAFNVVNKG

SEQ ID NO: 63 - protein, 8 aa, Artificial Sequence
  SARS-CoV-2 Epitope
SQDLSVVS

SEQ ID NO: 64 - protein, 12 aa, Artificial Sequence
  SARS-CoV-2 Epitope
TEISFMLWCKDG

SEQ ID NO: 65 - protein, 10 aa, Artificial Sequence
  SARS-CoV-2 Epitope
TLPVNVAFEL

SEQ ID NO: 66 - protein, 13 aa, Artificial Sequence
  SARS-CoV-2 Epitope
VKGLQPSVGPKQA

SEQ ID NO: 67 - protein, 28 aa, Artificial Sequence
  SARS-CoV-2 Epitope
RLCAYCCNIVNVSLVKPSFYVYSRVKNL

SEQ ID NO: 68 - protein, 20 aa, Artificial Sequence
  SARS-CoV-2 Epitope
RLCAYCCNIVNVSLVKPSFY

SEQ ID NO: 69 - protein, 14 aa, Artificial Sequence
  SARS-CoV-2 Epitope
CGACIRRPFLCCKC

SEQ ID NO: 70 - protein, 8 aa, Artificial Sequence
  SARS-CoV-2 Epitope
DHVISTSH

SEQ ID NO: 71 - protein, 10 aa, Artificial Sequence
  SARS-CoV-2 Epitope
DKLQFTSLEI

SEQ ID NO: 72 - protein, 8 aa, Artificial Sequence
  SARS-CoV-2 Epitope
DLSVVNAR

SEQ ID NO: 73 - protein, 10 aa, Artificial Sequence
  SARS-CoV-2 Epitope
EQYVFCTVNA

SEQ ID NO: 74 - protein, 37 aa, Artificial Sequence
  SARS-CoV-2 Epitope
GCDVTDVTQLYLGGMSYYCKSHKPPISFPLCANGQVF

SEQ ID NO: 75 - protein, 10 aa, Artificial Sequence
  SARS-CoV-2 Epitope
GVITHDVSSA

SEQ ID NO: 76 - protein, 57 aa, Artificial Sequence
  SARS-CoV-2 Epitope
HFAIGLALYYPSARIVYTACSHAAVDALCEKALKYLPIDKCSRIIPARARVECFDKF

SEQ ID NO: 77 - protein, 14 aa, Artificial Sequence
  SARS-CoV-2 Epitope
QEHYVRITGLYPTL

SEQ ID NO: 78 - protein, 20 aa, Artificial Sequence
  SARS-CoV-2 Epitope
RAKHYVYIGDPAQLPAPRTL

SEQ ID NO: 79 - protein, 12 aa, Artificial Sequence
  SARS-CoV-2 Epitope
TRAKVGILCIMS

SEQ ID NO: 80 - protein, 16 aa, Artificial Sequence
  SARS-CoV-2 Epitope
VREVLSDRELHLSWEV

SEQ ID NO: 81 - protein, 11 aa, Artificial Sequence
  SARS-CoV-2 Epitope
EQYVFCTVNAL

SEQ ID NO: 82 - protein, 39 aa, Artificial Sequence
  SARS-CoV-2 Epitope
GCDVTDVTQLYLGGMSYYCKSHKPPISFPLCANGQVFGL

SEQ ID NO: 83 - protein, 51 aa, Artificial Sequence
  SARS-CoV-2 Epitope
HFAIGLALYYPSARIVYTACSHAAVDALCEKALKYLPIDKCSRIIPARARV

SEQ ID NO: 84 - protein, 20 aa, Artificial Sequence
  SARS-CoV-2 Epitope
IRRPFLCCKCCYDHVISTSH

SEQ ID NO: 85 - protein, 8 aa, Artificial Sequence
  SARS-CoV-2 Epitope
KAVFISPY

SEQ ID NO: 86 - protein, 19 aa, Artificial Sequence
  SARS-CoV-2 Epitope
KLNVGDYFVLTSHTVMPLS

SEQ ID NO: 87 - protein, 10 aa, Artificial Sequence
  SARS-CoV-2 Epitope
QEHYVRITGL

SEQ ID NO: 88 - protein, 8 aa, Artificial Sequence
  SARS-CoV-2 Epitope
QIGVVREF

SEQ ID NO: 89 - protein, 9 aa, Artificial Sequence
  SARS-CoV-2 Epitope
YDLSVVNAR

SEQ ID NO: 90 - protein, 14 aa, Artificial Sequence
  SARS-CoV-2 Epitope
APGCDVTDVTQLYL

SEQ ID NO: 91 - protein, 8 aa, Artificial Sequence
  SARS-CoV-2 Epitope
FNSVCRLM

SEQ ID NO: 92 - protein, 15 aa, Artificial Sequence
  SARS-CoV-2 Epitope
RIIPARARVECFDKF

SEQ ID NO: 93 - protein, 16 aa, Artificial Sequence
  SARS-CoV-2 Epitope
SLRCGACIRRPFLCCK

SEQ ID NO: 94 - protein, 17 aa, Artificial Sequence
  SARS-CoV-2 Epitope
VPQEHYVRITGLYPTLN

SEQ ID NO: 95 - protein, 14 aa, Artificial Sequence
  SARS-CoV-2 Epitope
RLNVGDYFVLTSHT

SEQ ID NO: 96 - protein, 8 aa, Artificial Sequence
  SARS-CoV-2 Epitope
SSNVANYQ

SEQ ID NO: 97 - protein, 15 aa, Artificial Sequence
  SARS-CoV-2 Epitope
SYFAIGLALYYPSAR

SEQ ID NO: 98 - protein, 11 aa, Artificial Sequence
  SARS-CoV-2 Epitope
YDNLQFISLEI

SEQ ID NO: 99 - protein, 16 aa, Artificial Sequence
  SARS-CoV-2 Epitope
SRIIPARARVDCFDKF

SEQ ID NO: 100 - protein, 21 aa, Artificial Sequence
  SARS-CoV-2 Epitope
ALCEKALKYFPIDKCSRIIPA

SEQ ID NO: 101 - protein, 21 aa, Artificial Sequence
  SARS-CoV-2 Epitope
KLSYGIAIVREVLSDRELHLS

SEQ ID NO: 102 - protein, 23 aa, Artificial Sequence
  SARS-CoV-2 Epitope
YLGGMSYYCKSHKLPISFPLCAN

SEQ ID NO: 103 - protein, 10 aa, Artificial Sequence
  SARS-CoV-2 Epitope
LSVNPYVCNA

SEQ ID NO: 104 - protein, 23 aa, Artificial Sequence
  SARS-CoV-2 Epitope
TQLYLGGMSYYCKPHKPPISFPL

SEQ ID NO: 105 - protein, 15 aa, Artificial Sequence
  SARS-CoV-2 Epitope
HYVRITGLYPTLNIL

SEQ ID NO: 106 - protein, 8 aa, Artificial Sequence
  SARS-CoV-2 Epitope
SINVANYQ

SEQ ID NO: 107 - protein, 22 aa, Artificial Sequence
  SARS-CoV-2 Epitope
LGGMSYYCKSHKPSISFPLCAN

SEQ ID NO: 108 - protein, 11 aa, Artificial Sequence
  SARS-CoV-2 Epitope
ETTVDIVVFDE

SEQ ID NO: 109 - protein, 11 aa, Artificial Sequence
  SARS-CoV-2 Epitope
YDKLQFISLEI

SEQ ID NO: 110 - protein, 12 aa, Artificial Sequence
  SARS-CoV-2 Epitope
TRAKVGILCITS

SEQ ID NO: 111 - protein, 18 aa, Artificial Sequence
  SARS-CoV-2 Epitope
HVQLSLPVLQVRDVLVRG

SEQ ID NO: 112 - protein, 21 aa, Artificial Sequence
  SARS-CoV-2 Epitope
LGVLVPHVGEIPVAYRKVLLR

SEQ ID NO: 113 - protein, 11 aa, Artificial Sequence
  SARS-CoV-2 Epitope
VEEVLSEARQH

SEQ ID NO: 114 - protein, 22 aa, Artificial Sequence
  SARS-CoV-2 Epitope
TLGVLVPHVGEIPVAYRKVLLR

SEQ ID NO: 115 - protein, 8 aa, Artificial Sequence
  SARS-CoV-2 Epitope
VLSEARQH

SEQ ID NO: 116 - protein, 28 aa, Artificial Sequence
  SARS-CoV-2 Epitope
IKDLPKEITVATSRTLSYYKLGASQRVA

SEQ ID NO: 117 - protein, 12 aa, Artificial Sequence
  SARS-CoV-2 Epitope
LNVPLHGTILTR

SEQ ID NO: 118 - protein, 24 aa, Artificial Sequence
  SARS-CoV-2 Epitope
SELVIGAVILRGHLRIAGHHLGRC

SEQ ID NO: 119 - protein, 18 aa, Artificial Sequence
  SARS-CoV-2 Epitope
IKDLPKEITVATSRTLSY

SEQ ID NO: 120 - protein, 8 aa, Artificial Sequence
  SARS-CoV-2 Epitope
KLGASQRV

SEQ ID NO: 121 - protein, 13 aa, Artificial Sequence
  SARS-CoV-2 Epitope
LLNVPLHGTILTR

SEQ ID NO: 122 - protein, 11 aa, Artificial Sequence
  SARS-CoV-2 Epitope
LRIAGHHLGRC

SEQ ID NO: 123 - protein, 11 aa, Artificial Sequence
  SARS-CoV-2 Epitope
SELVIGAVILR

SEQ ID NO: 124 - protein, 21 aa, Artificial Sequence
  SARS-CoV-2 Epitope
ELVIGAVILRGHLRIAGHHLG

SEQ ID NO: 125 - protein, 29 aa, Artificial Sequence
  SARS-CoV-2 Epitope
FLYIIKLIFLWLLWPVTLACFVLAAVYRI

SEQ ID NO: 126 - protein, 22 aa, Artificial Sequence
  SARS-CoV-2 Epitope
IAMACLVGLMWLSYFIASFRLF

SEQ ID NO: 127 - protein, 23 aa, Artificial Sequence
  SARS-CoV-2 Epitope
KEITVATSRTLSYYKLGASQRVA

SEQ ID NO: 128 - protein, 21 aa, Artificial Sequence
  SARS-CoV-2 Epitope
QWNLVIGFLFLTWICLLQFAY

SEQ ID NO: 129 - protein, 11 aa, Artificial Sequence
  SARS-CoV-2 Epitope
ASCCLYCRCHI

SEQ ID NO: 130 - protein, 15 aa, Artificial Sequence
  SARS-CoV-2 Epitope
EVPANSTVLSFCAFA

SEQ ID NO: 131 - protein, 20 aa, Artificial Sequence
  SARS-CoV-2 Epitope
KGFCDLKGKYVQIPTTCAND

SEQ ID NO: 132 - protein, 14 aa, Artificial Sequence
  SARS-CoV-2 Epitope
GASCCLYCRCHIDH

SEQ ID NO: 133 - protein, 11 aa, Artificial Sequence
  SARS-CoV-2 Epitope
ITNCVKMLCTH

SEQ ID NO: 134 - protein, 18 aa, Artificial Sequence
  SARS-CoV-2 Epitope
KGFCDLKGKYVQIPTTCA

SEQ ID NO: 135 - protein, 10 aa, Artificial Sequence
  SARS-CoV-2 Epitope
KNTVCTVCGM

SEQ ID NO: 136 - protein, 23 aa, Artificial Sequence
  SARS-CoV-2 Epitope
FGGCVFSYVGCHNKCAYWVPRAS

SEQ ID NO: 137 - protein, 14 aa, Artificial Sequence
  SARS-CoV-2 Epitope
FGTVYEKLKPVLDW

SEQ ID NO: 138 - protein, 8 aa, Artificial Sequence
  SARS-CoV-2 Epitope
FVKATCEF

SEQ ID NO: 139 - protein, 15 aa, Artificial Sequence
  SARS-CoV-2 Epitope
GETFVTHSKGLYRKC

SEQ ID NO: 140 - protein, 17 aa, Artificial Sequence
  SARS-CoV-2 Epitope
IVKFISTCACEIVGGQI

SEQ ID NO: 141 - protein, 10 aa, Artificial Sequence
  SARS-CoV-2 Epitope
KASCTLSEQL

SEQ ID NO: 142 - protein, 10 aa, Artificial Sequence
  SARS-CoV-2 Epitope
KESVQTFFKL

SEQ ID NO: 143 - protein, 21 aa, Artificial Sequence
  SARS-CoV-2 Epitope
KSILSPLYAFASEAARVVRSI

SEQ ID NO: 144 - protein, 12 aa, Artificial Sequence
  SARS-CoV-2 Epitope
MPLKAPKEIIFL

SEQ ID NO: 145 - protein, 8 aa, Artificial Sequence
  SARS-CoV-2 Epitope
NHTGVVGE

SEQ ID NO: 146 - protein, 8 aa, Artificial Sequence
  SARS-CoV-2 Epitope
NQMCLSTL

SEQ ID NO: 147 - protein, 18 aa, Artificial Sequence
  SARS-CoV-2 Epitope
PNFVFPLNSIIKTIQPRV

SEQ ID NO: 148 - protein, 26 aa, Artificial Sequence
  SARS-CoV-2 Epitope
QNSVRVLQKAAITILDGISQYSLRLI

SEQ ID NO: 149 - protein, 20 aa, Artificial Sequence
  SARS-CoV-2 Epitope
SEAVEAPLVGTPVCINGLML

SEQ ID NO: 150 - protein, 13 aa, Artificial Sequence
  SARS-CoV-2 Epitope
SYELQTPFEIKLA

SEQ ID NO: 151 - protein, 13 aa, Artificial Sequence
  SARS-CoV-2 Epitope
AFASEAARVVRSI

SEQ ID NO: 152 - protein, 10 aa, Artificial Sequence
  SARS-CoV-2 Epitope
ETFVTHSKGL

SEQ ID NO: 153 - protein, 27 aa, Artificial Sequence
  SARS-CoV-2 Epitope
FSASTSAFVETVKGLDYKAFKQIVESC

SEQ ID NO: 154 - protein, 8 aa, Artificial Sequence
  SARS-CoV-2 Epitope
GVYCCREH

SEQ ID NO: 155 - protein, 20 aa, Artificial Sequence
  SARS-CoV-2 Epitope
GYLPQNAVVKIYCPACHNSE

SEQ ID NO: 156 - protein, 13 aa, Artificial Sequence
  SARS-CoV-2 Epitope
IVKFISTCACEIV

SEQ ID NO: 157 - protein, 13 aa, Artificial Sequence
  SARS-CoV-2 Epitope
KASCTLSEQLDFI

SEQ ID NO: 158 - protein, 10 aa, Artificial Sequence
  SARS-CoV-2 Epitope
KCAYWVPRAS

SEQ ID NO: 159 - protein, 11 aa, Artificial Sequence
  SARS-CoV-2 Epitope
KESVQTFFKLV

SEQ ID NO: 160 - protein, 20 aa, Artificial Sequence
  SARS-CoV-2 Epitope
LQKAAITILDGISQYSLRLI

SEQ ID NO: 161 - protein, 12 aa, Artificial Sequence
  SARS-CoV-2 Epitope
NIGCNHTGVVGE

SEQ ID NO: 162 - protein, 8 aa, Artificial Sequence
  SARS-CoV-2 Epitope
NNLVVMAY

SEQ ID NO: 163 - protein, 8 aa, Artificial Sequence
  SARS-CoV-2 Epitope
PEHSLAEY

SEQ ID NO: 164 - protein, 17 aa, Artificial Sequence
  SARS-CoV-2 Epitope
PNFVFPLNSIIKTIQPR

SEQ ID NO: 165 - protein, 9 aa, Artificial Sequence
  SARS-CoV-2 Epitope
RSVYPVASP

SEQ ID NO: 166 - protein, 15 aa, Artificial Sequence
  SARS-CoV-2 Epitope
SYELQTPFEIKLAKK

SEQ ID NO: 167 - protein, 8 aa, Artificial Sequence
  SARS-CoV-2 Epitope
ADAVIKTL

SEQ ID NO: 168 - protein, 10 aa, Artificial Sequence
  SARS-CoV-2 Epitope
AQYELKHGTF

SEQ ID NO: 169 - protein, 8 aa, Artificial Sequence
  SARS-CoV-2 Epitope
ARDLSLQF

SEQ ID NO: 170 - protein, 14 aa, Artificial Sequence
  SARS-CoV-2 Epitope
CATTRQVVNVVTTK

SEQ ID NO: 171 - protein, 21 aa, Artificial Sequence
  SARS-CoV-2 Epitope
CSARHINAQVAKSHNIALIWN

SEQ ID NO: 172 - protein, 24 aa, Artificial Sequence
  SARS-CoV-2 Epitope
DPIHSLRVCVDTVRTNVYLAVFDK

SEQ ID NO: 173 - protein, 8 aa, Artificial Sequence
  SARS-CoV-2 Epitope
DVVECLKL

SEQ ID NO: 174 - protein, 12 aa, Artificial Sequence
  SARS-CoV-2 Epitope
FKLASHMYCSFY

SEQ ID NO: 175 - protein, 15 aa, Artificial Sequence
  SARS-CoV-2 Epitope
FSGYLKLTDNVYIKN

SEQ ID NO: 176 - protein, 12 aa, Artificial Sequence
  SARS-CoV-2 Epitope
GDVVAIDYKHYT

SEQ ID NO: 177 - protein, 13 aa, Artificial Sequence
  SARS-CoV-2 Epitope
GVVDYGARFYFYT

SEQ ID NO: 178 - protein, 11 aa, Artificial Sequence
  SARS-CoV-2 Epitope
HNLAKHCLHVV

SEQ ID NO: 179 - protein, 8 aa, Artificial Sequence
  SARS-CoV-2 Epitope
IETISLAG

SEQ ID NO: 180 - protein, 16 aa, Artificial Sequence
  SARS-CoV-2 Epitope
IKPVTYKLDGVVCTEI

SEQ ID NO: 181 - protein, 15 aa, Artificial Sequence
  SARS-CoV-2 Epitope
KETLYCIDGALLTKS

SEQ ID NO: 182 - protein, 12 aa, Artificial Sequence
  SARS-CoV-2 Epitope
KTTEVVGDIILK

SEQ ID NO: 183 - protein, 25 aa, Artificial Sequence
  SARS-CoV-2 Epitope
KVKPTVVVNAANVYLKHGGGVAGAL

SEQ ID NO: 184 - protein, 10 aa, Artificial Sequence
  SARS-CoV-2 Epitope
LLHKPIVWHV

SEQ ID NO: 185 - protein, 8 aa, Artificial Sequence
  SARS-CoV-2 Epitope
LLLDQALV

SEQ ID NO: 186 - protein, 10 aa, Artificial Sequence
  SARS-CoV-2 Epitope
MPLGYVTHGL

SEQ ID NO: 187 - protein, 14 aa, Artificial Sequence
  SARS-CoV-2 Epitope
MPVCVETKAIVSTI

SEQ ID NO: 188 - protein, 10 aa, Artificial Sequence
  SARS-CoV-2 Epitope
NWNCVNCDTF

SEQ ID NO: 189 - protein, 8 aa, Artificial Sequence
  SARS-CoV-2 Epitope
NYQCGHYK

SEQ ID NO: 190 - protein, 14 aa, Artificial Sequence
  SARS-CoV-2 Epitope
QIELKFNPPALQDA

SEQ ID NO: 191 - protein, 16 aa, Artificial Sequence
  SARS-CoV-2 Epitope
SAEVAVKMFDAYVNTF

SEQ ID NO: 192 - protein, 30 aa, Artificial Sequence
  SARS-CoV-2 Epitope
SDIDITFLKKDAPYIVGDVVQEGVLTAVVI

SEQ ID NO: 193 - protein, 28 aa, Artificial Sequence
  SARS-CoV-2 Epitope
SIPCSVCLSGLDSLDTYPSLETIQITIS

SEQ ID NO: 194 - protein, 11 aa, Artificial Sequence
  SARS-CoV-2 Epitope
SPDAVTAYNGY

SEQ ID NO: 195 - protein, 8 aa, Artificial Sequence
  SARS-CoV-2 Epitope
SRELKVTF

SEQ ID NO: 196 - protein, 14 aa, Artificial Sequence
  SARS-CoV-2 Epitope
SVGKFCLEASFNYL

SEQ ID NO: 197 - protein, 15 aa, Artificial Sequence
  SARS-CoV-2 Epitope
TKYLVQQESPFVMMS

SEQ ID NO: 198 - protein, 13 aa, Artificial Sequence
  SARS-CoV-2 Epitope
TVLKKCKSAFYIL

SEQ ID NO: 199 - protein, 12 aa, Artificial Sequence
  SARS-CoV-2 Epitope
YAKPFLNKVVST

SEQ ID NO: 200 - protein, 8 aa, Artificial Sequence
  SARS-CoV-2 Epitope
YDKLVSSF

SEQ ID NO: 201 - protein, 20 aa, Artificial Sequence
  SARS-CoV-2 Epitope
YLFQHANLDSCKRVLNVVCK

SEQ ID NO: 202 - protein, 10 aa, Artificial Sequence
  SARS-CoV-2 Epitope
ACIDCSARHI

SEQ ID NO: 203 - protein, 12 aa, Artificial Sequence
  SARS-CoV-2 Epitope
AKLLHKPIVWHV

SEQ ID NO: 204 - protein, 13 aa, Artificial Sequence
  SARS-CoV-2 Epitope
ANFCALILAYCNK

SEQ ID NO: 205 - protein, 8 aa, Artificial Sequence
  SARS-CoV-2 Epitope
CLNRVCTN

SEQ ID NO: 206 - protein, 11 aa, Artificial Sequence
  SARS-CoV-2 Epitope
DNVLSTFISAA

SEQ ID NO: 207 - protein, 10 aa, Artificial Sequence
  SARS-CoV-2 Epitope
DPIHSLRVCV

SEQ ID NO: 208 - protein, 10 aa, Artificial Sequence
  SARS-CoV-2 Epitope
DVVAIDYKHY

SEQ ID NO: 209 - protein, 14 aa, Artificial Sequence
  SARS-CoV-2 Epitope
EGVVDYGARFYFYT

SEQ ID NO: 210 - protein, 20 aa, Artificial Sequence
  SARS-CoV-2 Epitope
FCKLHNWNCVNCDTFCAGST

SEQ ID NO: 211 - protein, 10 aa, Artificial Sequence
  SARS-CoV-2 Epitope
FCLEASFNYL

SEQ ID NO: 212 - protein, 8 aa, Artificial Sequence
  SARS-CoV-2 Epitope
FKLASHMY

SEQ ID NO: 213 - protein, 12 aa, Artificial Sequence
  SARS-CoV-2 Epitope
IEVQGYKSVNIT

SEQ ID NO: 214 - protein, 10 aa, Artificial Sequence
  SARS-CoV-2 Epitope
KACVEEVTTT

SEQ ID NO: 215 - protein, 11 aa, Artificial Sequence
  SARS-CoV-2 Epitope
KGVQIPCTCGK

SEQ ID NO: 216 - protein, 20 aa, Artificial Sequence
  SARS-CoV-2 Epitope
KLTCATTRQVVNVVTTKIAL

SEQ ID NO: 217 - protein, 10 aa, Artificial Sequence
  SARS-CoV-2 Epitope
KSASVYYSQL

SEQ ID NO: 218 - protein, 17 aa, Artificial Sequence
  SARS-CoV-2 Epitope
LECNVKTTEVVGDIILK

SEQ ID NO: 219 - protein, 8 aa, Artificial Sequence
  SARS-CoV-2 Epitope
LPINVIVF

SEQ ID NO: 220 - protein, 9 aa, Artificial Sequence
  SARS-CoV-2 Epitope
MPVCVETKA

SEQ ID NO: 221 - protein, 10 aa, Artificial Sequence
  SARS-CoV-2 Epitope
NYQCGHYKHI

SEQ ID NO: 222 - protein, 8 aa, Artificial Sequence
  SARS-CoV-2 Epitope
PSFLGRYM

SEQ ID NO: 223 - protein, 15 aa, Artificial Sequence
  SARS-CoV-2 Epitope
QIELKFNPPALQDAY

SEQ ID NO: 224 - protein, 10 aa, Artificial Sequence
  SARS-CoV-2 Epitope
RHSLSHFVNL

SEQ ID NO: 225 - protein, 8 aa, Artificial Sequence
  SARS-CoV-2 Epitope
RVEAFEYY

SEQ ID NO: 226 - protein, 25 aa, Artificial Sequence
  SARS-CoV-2 Epitope
SDIDITFLKKDAPYIVGDVVQEGVL

SEQ ID NO: 227 - protein, 9 aa, Artificial Sequence
  SARS-CoV-2 Epitope
SRELKVTFF

SEQ ID NO: 228 - protein, 12 aa, Artificial Sequence
  SARS-CoV-2 Epitope
SSPDAVTAYNGY

SEQ ID NO: 229 - protein, 14 aa, Artificial Sequence
  SARS-CoV-2 Epitope
SYLFQHANLDSCKR

SEQ ID NO: 230 - protein, 9 aa, Artificial Sequence
  SARS-CoV-2 Epitope
TENLLLYID

SEQ ID NO: 231 - protein, 23 aa, Artificial Sequence
  SARS-CoV-2 Epitope
TIATYCTGSIPCSVCLSGLDSLD

SEQ ID NO: 232 - protein, 14 aa, Artificial Sequence
  SARS-CoV-2 Epitope
TKDVVECLKLSHQS

SEQ ID NO: 233 - protein, 16 aa, Artificial Sequence
  SARS-CoV-2 Epitope
TVLKKCKSAFYILPSI

SEQ ID NO: 234 - protein, 10 aa, Artificial Sequence
  SARS-CoV-2 Epitope
VQQESPFVMM

SEQ ID NO: 235 - protein, 12 aa, Artificial Sequence
  SARS-CoV-2 Epitope
VRTNVYLAVFDK

SEQ ID NO: 236 - protein, 12 aa, Artificial Sequence
  SARS-CoV-2 Epitope
VTMPLGYVTHGL

SEQ ID NO: 237 - protein, 10 aa, Artificial Sequence
  SARS-CoV-2 Epitope
VVADAVIKTL

SEQ ID NO: 238 - protein, 11 aa, Artificial Sequence
  SARS-CoV-2 Epitope
VVNAANVYLKH

SEQ ID NO: 239 - protein, 13 aa, Artificial Sequence
  SARS-CoV-2 Epitope
YAKPFLNKVVSTT

SEQ ID NO: 240 - protein, 11 aa, Artificial Sequence
  SARS-CoV-2 Epitope
YELKHGTFTCA

SEQ ID NO: 241 - protein, 12 aa, Artificial Sequence
  SARS-CoV-2 Epitope
YPSLETIQITIS

SEQ ID NO: 242 - protein, 18 aa, Artificial Sequence
  SARS-CoV-2 Epitope
DKACPLIAAVITREVGFV

SEQ ID NO: 243 - protein, 10 aa, Artificial Sequence
  SARS-CoV-2 Epitope
LEGSVAYESL

SEQ ID NO: 244 - protein, 22 aa, Artificial Sequence
  SARS-CoV-2 Epitope
LPRVFSAVGNICYTPSKLIEYT

SEQ ID NO: 245 - protein, 17 aa, Artificial Sequence
  SARS-CoV-2 Epitope
LTQYNRYLALYNKYKYF

SEQ ID NO: 246 - protein, 15 aa, Artificial Sequence
  SARS-CoV-2 Epitope
SDVLYQPPQTSITSA

SEQ ID NO: 247 - protein, 10 aa, Artificial Sequence
  SARS-CoV-2 Epitope
TPLIQPIGAL

SEQ ID NO: 248 - protein, 8 aa, Artificial Sequence
  SARS-CoV-2 Epitope
YLKLRSDV

SEQ ID NO: 249 - protein, 11 aa, Artificial Sequence
  SARS-CoV-2 Epitope
CYTPSKLIEYT

SEQ ID NO: 250 - protein, 8 aa, Artificial Sequence
  SARS-CoV-2 Epitope
DVLYQPPQ

SEQ ID NO: 251 - protein, 10 aa, Artificial Sequence
  SARS-CoV-2 Epitope
EGSVRVVTTF

SEQ ID NO: 252 - protein, 11 aa, Artificial Sequence
  SARS-CoV-2 Epitope
GKPVPYCYDTN

SEQ ID NO: 253 - protein, 10 aa, Artificial Sequence
  SARS-CoV-2 Epitope
LPRVFSAVGN

SEQ ID NO: 254 - protein, 14 aa, Artificial Sequence
  SARS-CoV-2 Epitope
TSACVLAAECTIFK

SEQ ID NO: 255 - protein, 14 aa, Artificial Sequence
  SARS-CoV-2 Epitope
RLTLGVYDYLVSTQ

SEQ ID NO: 256 - protein, 16 aa, Artificial Sequence
  SARS-CoV-2 Epitope
ATVAYFNMVYMPASWV

SEQ ID NO: 257 - protein, 10 aa, Artificial Sequence
  SARS-CoV-2 Epitope
GVGGKPCIKV

SEQ ID NO: 258 - protein, 9 aa, Artificial Sequence
  SARS-CoV-2 Epitope
LKLKDCVMY

SEQ ID NO: 259 - protein, 14 aa, Artificial Sequence
  SARS-CoV-2 Epitope
LMNVLTLVYKVYYG

SEQ ID NO: 260 - protein, 11 aa, Artificial Sequence
  SARS-CoV-2 Epitope
MMFVKHKHAFL

SEQ ID NO: 261 - protein, 13 aa, Artificial Sequence
  SARS-CoV-2 Epitope
SMWALIISVTSNY

SEQ ID NO: 262 - protein, 29 aa, Artificial Sequence
  SARS-CoV-2 Epitope
TLQCIMLVYCFLGYFCTCYFGLFCLLNRY

SEQ ID NO: 263 - protein, 23 aa, Artificial Sequence
  SARS-CoV-2 Epitope
TTVMFLARGIVFMCVEYCPIFFI

SEQ ID NO: 264 - protein, 16 aa, Artificial Sequence
  SARS-CoV-2 Epitope
LMNVLTLFYKVYYGNA

SEQ ID NO: 265 - protein, 21 aa, Artificial Sequence
  SARS-CoV-2 Epitope
VMFLARGIVFMCVDYCPIFFI

SEQ ID NO: 266 - protein, 25 aa, Artificial Sequence
  SARS-CoV-2 Epitope
VLVQSTQWSLFFFFYENAFLPFAMG

SEQ ID NO: 267 - protein, 32 aa, Artificial Sequence
  SARS-CoV-2 Epitope
MMFVKHKHAFLCLFLLPSFATVAYFNMVYMPA

SEQ ID NO: 268 - protein, 15 aa, Artificial Sequence
  SARS-CoV-2 Epitope
VDTSLSSLKLKDCVM

SEQ ID NO: 269 - protein, 10 aa, Artificial Sequence
  SARS-CoV-2 Epitope
SFKLKDCVMY

SEQ ID NO: 270 - protein, 18 aa, Artificial Sequence
  SARS-CoV-2 Epitope
VTTVIFLARGIVFMCVEY

SEQ ID NO: 271 - protein, 18 aa, Artificial Sequence
  SARS-CoV-2 Epitope
FLYENAFLPFAMGVIAMS

SEQ ID NO: 272 - protein, 10 aa, Artificial Sequence
  SARS-CoV-2 Epitope
GLKLKDCVMY

SEQ ID NO: 273 - protein, 12 aa, Artificial Sequence
  SARS-CoV-2 Epitope
DTSLKLKECVMY

SEQ ID NO: 274 - protein, 17 aa, Artificial Sequence
  SARS-CoV-2 Epitope
LFFFLYENAFLPFVMGI

SEQ ID NO: 275 - protein, 29 aa, Artificial Sequence
  SARS-CoV-2 Epitope
SMWALIISVTSNYSGVVTIVMFLARGIVF

SEQ ID NO: 276 - protein, 15 aa, Artificial Sequence
  SARS-CoV-2 Epitope
SVLLSMQGAVDINKL

SEQ ID NO: 277 - protein, 13 aa, Artificial Sequence
  SARS-CoV-2 Epitope
QCVQLHNDILLAK

SEQ ID NO: 278 - protein, 12 aa, Artificial Sequence
  SARS-CoV-2 Epitope
SVLLSMQGAVDI

SEQ ID NO: 279 - protein, 14 aa, Artificial Sequence
  SARS-CoV-2 Epitope
DGCVPLNIIPLTTA

SEQ ID NO: 280 - protein, 8 aa, Artificial Sequence
  SARS-CoV-2 Epitope
LMVVIPDY

SEQ ID NO: 281 - protein, 9 aa, Artificial Sequence
  SARS-CoV-2 Epitope
KLMVVIPDY

SEQ ID NO: 282 - protein, 10 aa, Artificial Sequence
  SARS-CoV-2 Epitope
LAWPLIVTAL

SEQ ID NO: 283 - protein, 12 aa, Artificial Sequence
  SARS-CoV-2 Epitope
LKKLKKSLNVAK

SEQ ID NO: 284 - protein, 16 aa, Artificial Sequence
  SARS-CoV-2 Epitope
SEFSSLPSYAAFATAQ

SEQ ID NO: 285 - protein, 24 aa, Artificial Sequence
  SARS-CoV-2 Epitope
TYASALWEIQQVVDADSKIVQLSE

SEQ ID NO: 286 - protein, 10 aa, Artificial Sequence
  SARS-CoV-2 Epitope
GPKVKYLYFI

SEQ ID NO: 287 - protein, 13 aa, Artificial Sequence
  SARS-CoV-2 Epitope
YTELEPPCRFVTD

SEQ ID NO: 288 - protein, 11 aa, Artificial Sequence
  SARS-CoV-2 Epitope
GPKVKYLYFIK

SEQ ID NO: 289 - protein, 14 aa, Artificial Sequence
  SARS-CoV-2 Epitope
LSPVALRQMSCAAG

SEQ ID NO: 290 - protein, 9 aa, Artificial Sequence
  SARS-CoV-2 Epitope
VLGSLAATV

SEQ ID NO: 291 - protein, 16 aa, Artificial Sequence
  SARS-CoV-2 Epitope
DQVILLNKHIDAYKTF

SEQ ID NO: 292 - protein, 17 aa, Artificial Sequence
  SARS-CoV-2 Epitope
KHWPQIAQFAPSASAFF

SEQ ID NO: 293 - protein, 10 aa, Artificial Sequence
  SARS-CoV-2 Epitope
PRWYFYYLGT

SEQ ID NO: 294 - protein, 8 aa, Artificial Sequence
  SARS-CoV-2 Epitope
EVTPSGTW

SEQ ID NO: 295 - protein, 9 aa, Artificial Sequence
  SARS-CoV-2 Epitope
KHWPQIAQF

SEQ ID NO: 296 - protein, 8 aa, Artificial Sequence
  SARS-CoV-2 Epitope
WFTALTQH

SEQ ID NO: 297 - protein, 11 aa, Artificial Sequence
  SARS-CoV-2 Epitope
AALALLLLDRL

SEQ ID NO: 298 - protein, 16 aa, Artificial Sequence
  SARS-CoV-2 Epitope
HWPQIAQFAPSASAFF

SEQ ID NO: 299 - protein, 17 aa, Artificial Sequence
  SARS-CoV-2 Epitope
KDQVILLNKHIDAYKTF

SEQ ID NO: 300 - protein, 14 aa, Artificial Sequence
  SARS-CoV-2 Epitope
KHWPQIAQFAPSAS

SEQ ID NO: 301 - protein, 17 aa, Artificial Sequence
  SARS-CoV-2 Epitope
EVTPSGTWLTYTGAIKL

SEQ ID NO: 302 - protein, 17 aa, Artificial Sequence
  SARS-CoV-2 Epitope
ILLNKHIDAYKTFPPIE

SEQ ID NO: 303 - protein, 8 aa, Artificial Sequence
  SARS-CoV-2 Epitope
TQALLQRQ

SEQ ID NO: 304 - protein, 8 aa, Artificial Sequence
  SARS-CoV-2 Epitope
TQALPHRQ

SEQ ID NO: 305 - protein, 8 aa, Artificial Sequence
  SARS-CoV-2 Epitope
ETQALPQR

SEQ ID NO: 306 - protein, 9 aa, Artificial Sequence
  SARS-CoV-2 Epitope
YGIIWVATE

SEQ ID NO: 307 - protein, 18 aa, Artificial Sequence
  SARS-CoV-2 Epitope
INVFAFPFTIYSLLLCRM

SEQ ID NO: 308 - protein, 10 aa, Artificial Sequence
  SARS-CoV-2 Epitope
YIAQVDVVNF

SEQ ID NO: 309 - protein, 8 aa, Artificial Sequence
  SARS-CoV-2 Epitope
EHVQIHTI

SEQ ID NO: 310 - protein, 26 aa, Artificial Sequence
  SARS-CoV-2 Epitope
KNPLLYDANYFLCWHTNCYDYCIPYN

SEQ ID NO: 311 - protein, 8 aa, Artificial Sequence
  SARS-CoV-2 Epitope
SASKIITL

SEQ ID NO: 312 - protein, 15 aa, Artificial Sequence
  SARS-CoV-2 Epitope
VEHVTFFIYNKIVDE

SEQ ID NO: 313 - protein, 21 aa, Artificial Sequence
  SARS-CoV-2 Epitope
VKDCVVLHSYFTSDYYQLYST

SEQ ID NO: 314 - protein, 9 aa, Artificial Sequence
  SARS-CoV-2 Epitope
DYYQLYSTQ

SEQ ID NO: 315 - protein, 10 aa, Artificial Sequence
  SARS-CoV-2 Epitope
NCYDYCIPYN

SEQ ID NO: 316 - protein, 8 aa, Artificial Sequence
  SARS-CoV-2 Epitope
SDFVRATA

SEQ ID NO: 317 - protein, 8 aa, Artificial Sequence
  SARS-CoV-2 Epitope
VVNPVMEP

SEQ ID NO: 318 - protein, 10 aa, Artificial Sequence
  SARS-CoV-2 Epitope
YDANYFLCWH

SEQ ID NO: 319 - protein, 8 aa, Artificial Sequence
  SARS-CoV-2 Epitope
ISEHDYQI

SEQ ID NO: 320 - protein, 25 aa, Artificial Sequence
  SARS-CoV-2 Epitope
KNPLLYDANYFLCWHTNCYDYCIPY

SEQ ID NO: 321 - protein, 23 aa, Artificial Sequence
  SARS-CoV-2 Epitope
QLALSKGVYFVCNLLLLFVTVYS

SEQ ID NO: 322 - protein, 22 aa, Artificial Sequence
  SARS-CoV-2 Epitope
SDFVRATATIPIQASLPFGWLI

SEQ ID NO: 323 - protein, 8 aa, Artificial Sequence
  SARS-CoV-2 Epitope
SSIVITSV

SEQ ID NO: 324 - protein, 37 aa, Artificial Sequence
  SARS-CoV-2 Epitope
VAAGLEAPFLYLYALVYFLQSINFVRIIMRLWLCWKC

SEQ ID NO: 325 - protein, 19 aa, Artificial Sequence
  SARS-CoV-2 Epitope
VKDCVVLHSYFTSDYYQLY

SEQ ID NO: 326 - protein, 17 aa, Artificial Sequence
  SARS-CoV-2 Epitope
INFVRIIMRLWLCCKCR

SEQ ID NO: 327 - protein, 22 aa, Artificial Sequence
  SARS-CoV-2 Epitope
QLALSKGVHFVCNLLLLFVTVY

SEQ ID NO: 328 - protein, 15 aa, Artificial Sequence
  SARS-CoV-2 Epitope
ALLAVFQSASKIITL

SEQ ID NO: 329 - protein, 22 aa, Artificial Sequence
  SARS-CoV-2 Epitope
SDFVRATATIPIRASLPFGWLI

SEQ ID NO: 330 - protein, 19 aa, Artificial Sequence
  SARS-CoV-2 Epitope
VKDCVLLHSYFTSDYYQLY

SEQ ID NO: 331 - protein, 10 aa, Artificial Sequence
  SARS-CoV-2 Epitope
SPGVVNPVME

SEQ ID NO: 332 - protein, 11 aa, Artificial Sequence
  SARS-CoV-2 Epitope
SPGVFNPVMEP

SEQ ID NO: 333 - protein, 14 aa, Artificial Sequence
  SARS-CoV-2 Epitope
ESVVKDCVVLHSYF

SEQ ID NO: 334 - protein, 18 aa, Artificial Sequence
  SARS-CoV-2 Epitope
QLALFKGVHFVCNLLLLF

SEQ ID NO: 335 - protein, 14 aa, Artificial Sequence
  SARS-CoV-2 Epitope
TDTVVEHVTFFIYN

SEQ ID NO: 336 - protein, 15 aa, Artificial Sequence
  SARS-CoV-2 Epitope
VCNLLLLFVTVYSHL

SEQ ID NO: 337 - protein, 23 aa, Artificial Sequence
  SARS-CoV-2 Epitope
YALVYFLQSINFVIIIMRLWLCW

SEQ ID NO: 338 - protein, 23 aa, Artificial Sequence
  SARS-CoV-2 Epitope
VAAGLEAPFFYLYALVYFLQSIN

SEQ ID NO: 339 - protein, 22 aa, Artificial Sequence
  SARS-CoV-2 Epitope
LLYDANYFLCWHINCYDYCIPY

SEQ ID NO: 340 - protein, 19 aa, Artificial Sequence
  SARS-CoV-2 Epitope
QLSLSKGFHFVCNLLLLFV

SEQ ID NO: 341 - protein, 10 aa, Artificial Sequence
  SARS-CoV-2 Epitope
ISEHDYQIGG

SEQ ID NO: 342 - protein, 15 aa, Artificial Sequence
  SARS-CoV-2 Epitope
IPIRASLPFGWLIVG

SEQ ID NO: 343 - protein, 16 aa, Artificial Sequence
  SARS-CoV-2 Epitope
QLALSKGFHFVCNLLL

SEQ ID NO: 344 - protein, 12 aa, Artificial Sequence
  SARS-CoV-2 Epitope
SVFQSASKIITL

SEQ ID NO: 345 - protein, 20 aa, Artificial Sequence
  SARS-CoV-2 Epitope
DANYFLCWHTNCYHYCIPYN

SEQ ID NO: 346 - protein, 15 aa, Artificial Sequence
  SARS-CoV-2 Epitope
YFTSDYYQLYSTQLI

SEQ ID NO: 347 - protein, 28 aa, Artificial Sequence
  SARS-CoV-2 Epitope
FTSDYYQLYSTQLSTYTGVEHVTFFIYN

SEQ ID NO: 348 - protein, 17 aa, Artificial Sequence
  SARS-CoV-2 Epitope
GVHFVCNLLLLFVIVYS

SEQ ID NO: 349 - protein, 17 aa, Artificial Sequence
  SARS-CoV-2 Epitope
INFVRIIMRLWLCLKCR

SEQ ID NO: 350 - protein, 9 aa, Artificial Sequence
  SARS-CoV-2 Epitope
ISEHDYHIG

SEQ ID NO: 351 - protein, 25 aa, Artificial Sequence
  SARS-CoV-2 Epitope
AAGLEAPFLYLYVLVYFLQSINFVR

SEQ ID NO: 352 - protein, 23 aa, Artificial Sequence
  SARS-CoV-2 Epitope
KNPLLYDANYFLCCHTNCYDYCI

SEQ ID NO: 353 - protein, 10 aa, Artificial Sequence
  SARS-CoV-2 Epitope
ALLAVFHNAS

SEQ ID NO: 354 - protein, 8 aa, Artificial Sequence
  SARS-CoV-2 Epitope
SSIVITSG

SEQ ID NO: 355 - protein, 23 aa, Artificial Sequence
  SARS-CoV-2 Epitope
TFKVSIWNLDYIINLIIKNLSKS

SEQ ID NO: 356 - protein, 16 aa, Artificial Sequence
  SARS-CoV-2 Epitope
LVDFQVTIAEILLIIM

SEQ ID NO: 357 - protein, 10 aa, Artificial Sequence
  SARS-CoV-2 Epitope
NLIIKNLSKS

SEQ ID NO: 358 - protein, 12 aa, Artificial Sequence
  SARS-CoV-2 Epitope
TFKVSIWNLDYI

SEQ ID NO: 359 - protein, 37 aa, Artificial Sequence
  SARS-CoV-2 Epitope
ALTCFSTQFAFACPDGVKHVYQLRARSVSPKLFIRQE

SEQ ID NO: 360 - protein, 23 aa, Artificial Sequence
  SARS-CoV-2 Epitope
ELYHYQECVRGTTVLLKEPCSSG

SEQ ID NO: 361 - protein, 29 aa, Artificial Sequence
  SARS-CoV-2 Epitope
FAFACPDGVKHVYQLRARSVSPKLFIRQE

SEQ ID NO: 362 - protein, 20 aa, Artificial Sequence
  SARS-CoV-2 Epitope
HYQECVRGTTVLLKEPCSSG

SEQ ID NO: 363 - protein, 37 aa, Artificial Sequence
  SARS-CoV-2 Epitope
FHQECSLQSCTQHQPYVVDDPCPIHFYSKWYIRVGAR

SEQ ID NO: 364 - protein, 8 aa, Artificial Sequence
  SARS-CoV-2 Epitope
APLIELCV

SEQ ID NO: 365 - protein, 23 aa, Artificial Sequence
  SARS-CoV-2 Epitope
HQPYVVDDPCPIHFYSKWYIRVG

SEQ ID NO: 366 - protein, 24 aa, Artificial Sequence
  SARS-CoV-2 Epitope
LGSLVVRCSFYEDFLEYHDVRVVL

SEQ ID NO: 367 - protein, 14 aa, Artificial Sequence
  SARS-CoV-2 Epitope
ITTVAAFHQECSLQ

SEQ ID NO: 368 - protein, 16 aa, Artificial Sequence
  SARS-CoV-2 Epitope
NYTVSCLPFTINCQEP

SEQ ID NO: 369 - protein, 42 aa, Artificial Sequence
  SARS-CoV-2 Epitope
TTVAAFHQECSLQSCTQHQPYVVDDPCPIHFYSKWYIRVGAR

SEQ ID NO: 370 - protein, 11 aa, Artificial Sequence
  SARS-CoV-2 Epitope
CLPFTINCQKP

SEQ ID NO: 371 - protein, 16 aa, Artificial Sequence
  SARS-CoV-2 Epitope
NYTVSCSPFTINCQEP

SEQ ID NO: 372 - protein, 10 aa, Artificial Sequence
  SARS-CoV-2 Epitope
PFTINCQEPK

SEQ ID NO: 373 - protein, 14 aa, Artificial Sequence
  SARS-CoV-2 Epitope
IHFYSKWYIRVGAK

SEQ ID NO: 374 - protein, 10 aa, Artificial Sequence
  SARS-CoV-2 Epitope
LPFTINCQEL

SEQ ID NO: 375 - protein, 11 aa, Artificial Sequence
  SARS-CoV-2 Epitope
SAPLIELCLDE

SEQ ID NO: 376 - protein, 24 aa, Artificial Sequence
  SARS-CoV-2 Epitope
TTVAAFHQECSLQLCTQHQPYVVD

SEQ ID NO: 377 - protein, 18 aa, Artificial Sequence
  SARS-CoV-2 Epitope
ANSVFNICQAVTANVNAL

SEQ ID NO: 378 - protein, 15 aa, Artificial Sequence
  SARS-CoV-2 Epitope
AQSFLNRVCGVSAAR

SEQ ID NO: 379 - protein, 37 aa, Artificial Sequence
  SARS-CoV-2 Epitope
ARKHTTCCSLSHRFYRLANECAQVLSEMVMCGGSLYV

SEQ ID NO: 380 - protein, 25 aa, Artificial Sequence
  SARS-CoV-2 Epitope
DDRCILHCANFNVLFSTVFPPTSFG

SEQ ID NO: 381 - protein, 17 aa, Artificial Sequence
  SARS-CoV-2 Epitope
DKYVRNLQHRLYECLYR

SEQ ID NO: 382 - protein, 8 aa, Artificial Sequence
  SARS-CoV-2 Epitope
DSYFVVKR

SEQ ID NO: 383 - protein, 15 aa, Artificial Sequence
  SARS-CoV-2 Epitope
FKELLVYAADPAMHA

SEQ ID NO: 384 - protein, 17 aa, Artificial Sequence
  SARS-CoV-2 Epitope
FRELGVVHNQDVNLHSS

SEQ ID NO: 385 - protein, 15 aa, Artificial Sequence
  SARS-CoV-2 Epitope
FSVAALTNNVAFQTV

SEQ ID NO: 386 - protein, 13 aa, Artificial Sequence
  SARS-CoV-2 Epitope
FVVEVVDKYFDCY

SEQ ID NO: 387 - protein, 35 aa, Artificial Sequence
  SARS-CoV-2 Epitope
HEFCSQHTMLVKQGDDYVYLPYPDPSRILGAGCFV

SEQ ID NO: 388 - protein, 8 aa, Artificial Sequence
  SARS-CoV-2 Epitope
ISDYDYYR

SEQ ID NO: 389 - protein, 13 aa, Artificial Sequence
  SARS-CoV-2 Epitope
KEILVTYNCCDDD

SEQ ID NO: 390 - protein, 16 aa, Artificial Sequence
  SARS-CoV-2 Epitope
LLKDCPAVAKHDFFKF

SEQ ID NO: 391 - protein, 10 aa, Artificial Sequence
  SARS-CoV-2 Epitope
NEFYAYLRKH

SEQ ID NO: 392 - protein, 10 aa, Artificial Sequence
  SARS-CoV-2 Epitope
RQALLKTVQF

SEQ ID NO: 393 - protein, 8 aa, Artificial Sequence
  SARS-CoV-2 Epitope
SVELKHFF

SEQ ID NO: 394 - protein, 12 aa, Artificial Sequence
  SARS-CoV-2 Epitope
VPVVDSYYSLLM

SEQ ID NO: 395 - protein, 18 aa, Artificial Sequence
  SARS-CoV-2 Epitope
YADVFHLYLQYIRKLHDE

SEQ ID NO: 396 - protein, 17 aa, Artificial Sequence
  SARS-CoV-2 Epitope
AQSFLNRVCGVSAARLT

SEQ ID NO: 397 - protein, 20 aa, Artificial Sequence
  SARS-CoV-2 Epitope
DDRCILHCANFNVLFSTVFP

SEQ ID NO: 398 - protein, 15 aa, Artificial Sequence
  SARS-CoV-2 Epitope
ERFVSLAIDAYPLTK

SEQ ID NO: 399 - protein, 16 aa, Artificial Sequence
  SARS-CoV-2 Epitope
FRELGVVHNQDVNLHS

SEQ ID NO: 400 - protein, 12 aa, Artificial Sequence
  SARS-CoV-2 Epitope
HEFCSQHTMLVK

SEQ ID NO: 401 - protein, 32 aa, Artificial Sequence
  SARS-CoV-2 Epitope
IMASLVLARKHTTCCSLSHRFYRLANECAQVL

SEQ ID NO: 402 - protein, 18 aa, Artificial Sequence
  SARS-CoV-2 Epitope
LFVVEVVDKYFDCYDGGC

SEQ ID NO: 403 - protein, 14 aa, Artificial Sequence
  SARS-CoV-2 Epitope
LKEILVTYNCCDDD

SEQ ID NO: 404 - protein, 8 aa, Artificial Sequence
  SARS-CoV-2 Epitope
MADLVYAL

SEQ ID NO: 405 - protein, 16 aa, Artificial Sequence
  SARS-CoV-2 Epitope
RKIFVDGVPFVVSTGY

SEQ ID NO: 406 - protein, 14 aa, Artificial Sequence
  SARS-CoV-2 Epitope
RNLQHRLYECLYRN

SEQ ID NO: 407 - protein, 10 aa, Artificial Sequence
  SARS-CoV-2 Epitope
SVELKHFFFA

SEQ ID NO: 408 - protein, 9 aa, Artificial Sequence
  SARS-CoV-2 Epitope
VTANVNALL

SEQ ID NO: 409 - protein, 17 aa, Artificial Sequence
  SARS-CoV-2 Epitope
YADVFHLYLQYIRKLHD

SEQ ID NO: 410 - protein, 20 aa, Artificial Sequence
  SARS-CoV-2 Epitope
YVYLPYPDPSRILGAGCFVD

SEQ ID NO: 411 - protein, 19 aa, Artificial Sequence
  SARS-CoV-2 Epitope
ANSVFNICQAVTANVNALL

SEQ ID NO: 412 - protein, 9 aa, Artificial Sequence
  SARS-CoV-2 Epitope
ASQGLVASI

SEQ ID NO: 413 - protein, 16 aa, Artificial Sequence
  SARS-CoV-2 Epitope
DKYVRNLQHRLYECLY

SEQ ID NO: 414 - protein, 19 aa, Artificial Sequence
  SARS-CoV-2 Epitope
ECAQVLSETVMCGGSLYVK

SEQ ID NO: 415 - protein, 21 aa, Artificial Sequence
  SARS-CoV-2 Epitope
HPNCVNCSDDRCILHCANFNV

SEQ ID NO: 416 - protein, 10 aa, Artificial Sequence
  SARS-CoV-2 Epitope
ISDYDYYRYN

SEQ ID NO: 417 - protein, 11 aa, Artificial Sequence
  SARS-CoV-2 Epitope
RQALLKTVQFC

SEQ ID NO: 418 - protein, 8 aa, Artificial Sequence
  SARS-CoV-2 Epitope
SDDAVVCF

SEQ ID NO: 419 - protein, 18 aa, Artificial Sequence
  SARS-CoV-2 Epitope
SQHTMLVKQGDDYVYLPY

SEQ ID NO: 420 - protein, 14 aa, Artificial Sequence
  SARS-CoV-2 Epitope
TCFSVAALTNNVAF

SEQ ID NO: 421 - protein, 8 aa, Artificial Sequence
  SARS-CoV-2 Epitope
TDVVYRAF

SEQ ID NO: 422 - protein, 8 aa, Artificial Sequence
  SARS-CoV-2 Epitope
YDFAVSKG

SEQ ID NO: 423 - protein, 18 aa, Artificial Sequence
  SARS-CoV-2 Epitope
YNLLKDCPAVAKHDFFKF

SEQ ID NO: 424 - protein, 21 aa, Artificial Sequence
  SARS-CoV-2 Epitope
HPNCVNCLDDRCILHCANFNV

SEQ ID NO: 425 - protein, 14 aa, Artificial Sequence
  SARS-CoV-2 Epitope
IRNLQHRLYECLYR

SEQ ID NO: 426 - protein, 26 aa, Artificial Sequence
  SARS-CoV-2 Epitope
YRLANECAQVLSEIVMCGGSLYVKPG

SEQ ID NO: 427 - protein, 18 aa, Artificial Sequence
  SARS-CoV-2 Epitope
CANFNVLFSTVFPPTSFG

SEQ ID NO: 428 - protein, 22 aa, Artificial Sequence
  SARS-CoV-2 Epitope
SQHTMLVKQFDDYVYLPYPDPS

SEQ ID NO: 429 - protein, 8 aa, Artificial Sequence
  SARS-CoV-2 Epitope
DQDVLFAY

SEQ ID NO: 430 - protein, 8 aa, Artificial Sequence
  SARS-CoV-2 Epitope
DMYSVMLT

SEQ ID NO: 431 - protein, 15 aa, Artificial Sequence
  SARS-CoV-2 Epitope
YNLLKGCPAVAKHDF

SEQ ID NO: 432 - protein, 16 aa, Artificial Sequence
  SARS-CoV-2 Epitope
EEIIYNLLKDCPAVAK

SEQ ID NO: 433 - protein, 17 aa, Artificial Sequence
  SARS-CoV-2 Epitope
AAAYYVGYLQPRTFLLK

SEQ ID NO: 434 - protein, 8 aa, Artificial Sequence
  SARS-CoV-2 Epitope
AALQIPFA

SEQ ID NO: 435 - protein, 8 aa, Artificial Sequence
  SARS-CoV-2 Epitope
AEVQIDRL

SEQ ID NO: 436 - protein, 10 aa, Artificial Sequence
  SARS-CoV-2 Epitope
ARDLICAQKF

SEQ ID NO: 437 - protein, 14 aa, Artificial Sequence
  SARS-CoV-2 Epitope
ARSVASQSIIAYTM

SEQ ID NO: 438 - protein, 8 aa, Artificial Sequence
  SARS-CoV-2 Epitope
CSCGSCCK

SEQ ID NO: 439 - protein, 11 aa, Artificial Sequence
  SARS-CoV-2 Epitope
CTLKSFTVEKG

SEQ ID NO: 440 - protein, 15 aa, Artificial Sequence
  SARS-CoV-2 Epitope
EILDITPCSFGGVSV

SEQ ID NO: 441 - protein, 10 aa, Artificial Sequence
  SARS-CoV-2 Epitope
FEYVSQPFLM

SEQ ID NO: 442 - protein, 14 aa, Artificial Sequence
  SARS-CoV-2 Epitope
FFSNVTWFHAIHVS

SEQ ID NO: 443 - protein, 12 aa, Artificial Sequence
  SARS-CoV-2 Epitope
FNCYFPLQSYGF

SEQ ID NO: 444 - protein, 14 aa, Artificial Sequence
  SARS-CoV-2 Epitope
FQTLLALHRSYLTP

SEQ ID NO: 445 - protein, 12 aa, Artificial Sequence
  SARS-CoV-2 Epitope
GSNVFQTRAGCL

SEQ ID NO: 446 - protein, 20 aa, Artificial Sequence
  SARS-CoV-2 Epitope
INLVRDLPQGFSALEPLVDL

SEQ ID NO: 447 - protein, 15 aa, Artificial Sequence
  SARS-CoV-2 Epitope
ISNCVADYSVLYNSA

SEQ ID NO: 448 - protein, 12 aa, Artificial Sequence
  SARS-CoV-2 Epitope
ISVTTEILPVSM

SEQ ID NO: 449 - protein, 10 aa, Artificial Sequence
  SARS-CoV-2 Epitope
LQYGSFCTQL

SEQ ID NO: 450 - protein, 16 aa, Artificial Sequence
  SARS-CoV-2 Epitope
NDLCFTNVYADSFVIR

SEQ ID NO: 451 - protein, 12 aa, Artificial Sequence
  SARS-CoV-2 Epitope
NFRVQPTESIVR

SEQ ID NO: 452 - protein, 21 aa, Artificial Sequence
  SARS-CoV-2 Epitope
QPYRVVVLSFELLHAPATVCG

SEQ ID NO: 453 - protein, 8 aa, Artificial Sequence
  SARS-CoV-2 Epitope
TDAVDCAL

SEQ ID NO: 454 - protein, 8 aa, Artificial Sequence
  SARS-CoV-2 Epitope
TSCCSCLK

SEQ ID NO: 455 - protein, 32 aa, Artificial Sequence
  SARS-CoV-2 Epitope
VDFCGKGYHLMSFPQSAPHGVVFLHVTYVPAQ

SEQ ID NO: 456 - protein, 11 aa, Artificial Sequence
  SARS-CoV-2 Epitope
VLPFNDGVYFA

SEQ ID NO: 457 - protein, 20 aa, Artificial Sequence
  SARS-CoV-2 Epitope
VVIKVCEFQFCNDPFLGVYY

SEQ ID NO: 458 - protein, 18 aa, Artificial Sequence
  SARS-CoV-2 Epitope
YQDVNCTEVPVAIHADQL

SEQ ID NO: 459 - protein, 9 aa, Artificial Sequence
  SARS-CoV-2 Epitope
AAAYYVGYL

SEQ ID NO: 460 - protein, 12 aa, Artificial Sequence
  SARS-CoV-2 Epitope
ALGKLQDVVNQN

SEQ ID NO: 461 - protein, 13 aa, Artificial Sequence
  SARS-CoV-2 Epitope
ATNVVIKVCEFQF

SEQ ID NO: 462 - protein, 17 aa, Artificial Sequence
  SARS-CoV-2 Epitope
CSNLLLQYGSFCTQLNR

SEQ ID NO: 463 - protein, 9 aa, Artificial Sequence
  SARS-CoV-2 Epitope
EVFAQVKQI

SEQ ID NO: 464 - protein, 9 aa, Artificial Sequence
  SARS-CoV-2 Epitope
FFSNVTWFH

SEQ ID NO: 465 - protein, 8 aa, Artificial Sequence
  SARS-CoV-2 Epitope
FTGCVIAW

SEQ ID NO: 466 - protein, 10 aa, Artificial Sequence
  SARS-CoV-2 Epitope
GNCDVVIGIV

SEQ ID NO: 467 - protein, 16 aa, Artificial Sequence
  SARS-CoV-2 Epitope
GSNVFQTRAGCLIGAE

SEQ ID NO: 468 - protein, 22 aa, Artificial Sequence
  SARS-CoV-2 Epitope
GYQPYRVVVLSFELLHAPATVC

SEQ ID NO: 469 - protein, 8 aa, Artificial Sequence
  SARS-CoV-2 Epitope
ISNCVADY

SEQ ID NO: 470 - protein, 10 aa, Artificial Sequence
  SARS-CoV-2 Epitope
KQYGDCLGDI

SEQ ID NO: 471 - protein, 19 aa, Artificial Sequence
  SARS-CoV-2 Epitope
LEILDITPCSFGGVSVITP

SEQ ID NO: 472 - protein, 18 aa, Artificial Sequence
  SARS-CoV-2 Epitope
LNDLCFTNVYADSFVIRG

SEQ ID NO: 473 - protein, 16 aa, Artificial Sequence
  SARS-CoV-2 Epitope
LQSLQTYVTQQLIRAA

SEQ ID NO: 474 - protein, 20 aa, Artificial Sequence
  SARS-CoV-2 Epitope
MTSCCSCLKGCCSCGSCCKF

SEQ ID NO: 475 - protein, 13 aa, Artificial Sequence
  SARS-CoV-2 Epitope
NFRVQPTESIVRF

SEQ ID NO: 476 - protein, 13 aa, Artificial Sequence
  SARS-CoV-2 Epitope
NPVLPFNDGVYFA

SEQ ID NO: 477 - protein, 23 aa, Artificial Sequence
  SARS-CoV-2 Epitope
RVDFCGKGYHLMSFPQSAPHGVV

SEQ ID NO: 478 - protein, 8 aa, Artificial Sequence
  SARS-CoV-2 Epitope
SLIDLQEL

SEQ ID NO: 479 - protein, 8 aa, Artificial Sequence
  SARS-CoV-2 Epitope
SVDCTMYI

SEQ ID NO: 480 - protein, 10 aa, Artificial Sequence
  SARS-CoV-2 Epitope
TQNVLYENQK

SEQ ID NO: 481 - protein, 15 aa, Artificial Sequence
  SARS-CoV-2 Epitope
VNCTEVPVAIHADQL

SEQ ID NO: 482 - protein, 8 aa, Artificial Sequence
  SARS-CoV-2 Epitope
YDPLQPEL

SEQ ID NO: 483 - protein, 19 aa, Artificial Sequence
  SARS-CoV-2 Epitope
AIPINFTISVTTEILPVSM

SEQ ID NO: 484 - protein, 15 aa, Artificial Sequence
  SARS-CoV-2 Epitope
AYYVGYLQPRTFLLK

SEQ ID NO: 485 - protein, 14 aa, Artificial Sequence
  SARS-CoV-2 Epitope
ETKCTLKSFTVEKG

SEQ ID NO: 486 - protein, 12 aa, Artificial Sequence
  SARS-CoV-2 Epitope
EVFAQVKQIYKT

SEQ ID NO: 487 - protein, 20 aa, Artificial Sequence
  SARS-CoV-2 Epitope
FPQSAPHGVVFLHVTYVPAQ

SEQ ID NO: 488 - protein, 13 aa, Artificial Sequence
  SARS-CoV-2 Epitope
FQTLLALHRSYLT

SEQ ID NO: 489 - protein, 12 aa, Artificial Sequence
  SARS-CoV-2 Epitope
FRSSVLHSTQDL

SEQ ID NO: 490 - protein, 18 aa, Artificial Sequence
  SARS-CoV-2 Epitope
IKVCEFQFCNDPFLGVYH

SEQ ID NO: 491 - protein, 22 aa, Artificial Sequence
  SARS-CoV-2 Epitope
INLVRDLPQGFSALEPLVDLPI

SEQ ID NO: 492 - protein, 8 aa, Artificial Sequence
  SARS-CoV-2 Epitope
PVLKGVKL

SEQ ID NO: 493 - protein, 8 aa, Artificial Sequence
  SARS-CoV-2 Epitope
REGVFVSN

SEQ ID NO: 494 - protein, 13 aa, Artificial Sequence
  SARS-CoV-2 Epitope
RSVASQSIIAYTM

SEQ ID NO: 495 - protein, 8 aa, Artificial Sequence
  SARS-CoV-2 Epitope
STFKCYGV

SEQ ID NO: 496 - protein, 10 aa, Artificial Sequence
  SARS-CoV-2 Epitope
SVLNDILARL

SEQ ID NO: 497 - protein, 9 aa, Artificial Sequence
  SARS-CoV-2 Epitope
TEIYQAGST

SEQ ID NO: 498 - protein, 14 aa, Artificial Sequence
  SARS-CoV-2 Epitope
TSGVGYQPYRVVVL

SEQ ID NO: 499 - protein, 11 aa, Artificial Sequence
  SARS-CoV-2 Epitope
VLYQGVNCTEV

SEQ ID NO: 500 - protein, 31 aa, Artificial Sequence
  SARS-CoV-2 Epitope
YIWLGFIAGLIAIVMVTIMLCCMTSCCSCLK

SEQ ID NO: 501 - protein, 15 aa, Artificial Sequence
  SARS-CoV-2 Epitope
TYGVGYQPYRVVVLS

SEQ ID NO: 502 - protein, 14 aa, Artificial Sequence
  SARS-CoV-2 Epitope
ANPVLPFNDGVYFA

SEQ ID NO: 503 - protein, 20 aa, Artificial Sequence
  SARS-CoV-2 Epitope
PINLVRGLPQGFSALEPLVD

SEQ ID NO: 504 - protein, 11 aa, Artificial Sequence
  SARS-CoV-2 Epitope
RFQLHRSYLTP

SEQ ID NO: 505 - protein, 14 aa, Artificial Sequence
  SARS-CoV-2 Epitope
SVASQSIIAYTMSL

SEQ ID NO: 506 - protein, 13 aa, Artificial Sequence
  SARS-CoV-2 Epitope
ISSVLNDILSRLD

SEQ ID NO: 507 - protein, 24 aa, Artificial Sequence
  SARS-CoV-2 Epitope
PINLVRDLPQGFSVLEPLVDLPIG

SEQ ID NO: 508 - protein, 14 aa, Artificial Sequence
  SARS-CoV-2 Epitope
LVLLPLVSSQCVNF

SEQ ID NO: 509 - protein, 22 aa, Artificial Sequence
  SARS-CoV-2 Epitope
NVVIKVCEFQFCNYPFLGVYYH

SEQ ID NO: 510 - protein, 9 aa, Artificial Sequence
  SARS-CoV-2 Epitope
SPDVDLADI

SEQ ID NO: 511 - protein, 19 aa, Artificial Sequence
  SARS-CoV-2 Epitope
QVAVLYQDVNCTEVPVAIH

SEQ ID NO: 512 - protein, 14 aa, Artificial Sequence
  SARS-CoV-2 Epitope
IKVCEFQFCNDPYY

SEQ ID NO: 513 - protein, 9 aa, Artificial Sequence
  SARS-CoV-2 Epitope
EPLLKGVKL

SEQ ID NO: 514 - protein, 9 aa, Artificial Sequence
  SARS-CoV-2 Epitope
VFSQCVNLT

SEQ ID NO: 515 - protein, 12 aa, Artificial Sequence
  SARS-CoV-2 Epitope
FSNVTWFHAIVS

SEQ ID NO: 516 - protein, 17 aa, Artificial Sequence
  SARS-CoV-2 Epitope
SAAYYVGYLQLRTFLLK

SEQ ID NO: 517 - protein, 10 aa, Artificial Sequence
  SARS-CoV-2 Epitope
KQYGDCLGNI

SEQ ID NO: 518 - protein, 8 aa, Artificial Sequence
  SARS-CoV-2 Epitope
EIYQAGSK

SEQ ID NO: 519 - protein, 15 aa, Artificial Sequence
  SARS-CoV-2 Epitope
TISVTTEILPVSMAK

SEQ ID NO: 520 - protein, 15 aa, Artificial Sequence
  SARS-CoV-2 Epitope
ARSVARQSIIAYTMS

SEQ ID NO: 521 - protein, 23 aa, Artificial Sequence
  SARS-CoV-2 Epitope
LIAIVMVTIMLCCITSCCSCLKG

SEQ ID NO: 522 - protein, 10 aa, Artificial Sequence
  SARS-CoV-2 Epitope
AGAALQIPFA

SEQ ID NO: 523 - protein, 11 aa, Artificial Sequence
  SARS-CoV-2 Epitope
FFSNVTWFHVS

SEQ ID NO: 524 - protein, 23 aa, Artificial Sequence
  SARS-CoV-2 Epitope
GKIQDSLFSTASALGKLQDVVNQ

SEQ ID NO: 525 - protein, 15 aa, Artificial Sequence
  SARS-CoV-2 Epitope
EFQFCNYPFLGVYHK

SEQ ID NO: 526 - protein, 10 aa, Artificial Sequence
  SARS-CoV-2 Epitope
SSVLHSTQDF

SEQ ID NO: 527 - protein, 16 aa, Artificial Sequence
  SARS-CoV-2 Epitope
FSNVTWFHAIHVSGTN

SEQ ID NO: 528 - protein, 14 aa, Artificial Sequence
  SARS-CoV-2 Epitope
GFNCYSPLQSYGFQ

SEQ ID NO: 529 - protein, 21 aa, Artificial Sequence
  SARS-CoV-2 Epitope
AVLYQGVNCTEVPFAIHADQL

SEQ ID NO: 530 - protein, 20 aa, Artificial Sequence
  SARS-CoV-2 Epitope
PINLVRGLPQGFSVLEPLVD

SEQ ID NO: 531 - protein, 11 aa, Artificial Sequence
  SARS-CoV-2 Epitope
HFPRKGVFVSN

SEQ ID NO: 532 - protein, 16 aa, Artificial Sequence
  SARS-CoV-2 Epitope
FLVLLPLVSIQCVNLT

SEQ ID NO: 533 - protein, 14 aa, Artificial Sequence
  SARS-CoV-2 Epitope
GFNCYFPLQPYGFQ

SEQ ID NO: 534 - protein, 14 aa, Artificial Sequence
  SARS-CoV-2 Epitope
GGVPVVDSYYSLLM

SEQ ID NO: 535 - protein, 26 aa, Artificial Sequence
  SARS-CoV-2 Epitope
VPVVDSYYSLLMPILTLIRALTAESH

SEQ ID NO: 536 - protein, 21 aa, Artificial Sequence
  SARS-CoV-2 Epitope
KLSYGVATVREVLSDRELHLS

SEQ ID NO: 537 - protein, 18 aa, Artificial Sequence
  SARS-CoV-2 Epitope
NTVKSVGKFCLEASFNYL

SEQ ID NO: 538 - protein, 34 aa, Artificial Sequence
  SARS-CoV-2 Epitope
APGCDVTDVTQLYLGGMSYYCKSHKPPISFPLCA

SEQ ID NO: 539 - protein, 23 aa, Artificial Sequence
  SARS-CoV-2 Epitope
GCDVTDVTQLYLGGMSYYCKSHK

SEQ ID NO: 540 - protein, 16 aa, Artificial Sequence
  SARS-CoV-2 Epitope
GYHLMSFPQSAPHGVV

SEQ ID NO: 541 - protein, 33 aa, Artificial Sequence
  SARS-CoV-2 Epitope
RVDFCGKGYHLMSFPQSAPHGVVFLHVTYVPAQ

SEQ ID NO: 542 - protein, 14 aa, Artificial Sequence
  SARS-CoV-2 Epitope
HGVVFLHVTYVPAH

SEQ ID NO: 543 - protein, 26 aa, Artificial Sequence
  SARS-CoV-2 Epitope
ASLPFGWLIVGVAFLAVFHSASKIIT

SEQ ID NO: 544 - protein, 18 aa, Artificial Sequence
  SARS-CoV-2 Epitope
YIWLVFIAGLIAIVMVTI

SEQ ID NO: 545 - protein, 12 aa, Artificial Sequence
  SARS-CoV-2 Epitope
FFSNVTWFHVIS

SEQ ID NO: 546 - protein, 17 aa, Artificial Sequence
  SARS-CoV-2 Epitope
NVGDYFVLTSHTVIPLS

SEQ ID NO: 547 - protein, 14 aa, Artificial Sequence
  SARS-CoV-2 Epitope
SAMACLVGLMWLSY

SEQ ID NO: 548 - protein, 20 aa, Artificial Sequence
  SARS-CoV-2 Epitope
QWNLVIGFLLLTWICLLQFA

SEQ ID NO: 549 - protein, 14 aa, Artificial Sequence
  SARS-CoV-2 Epitope
AAACYVGYLQPRTF

SEQ ID NO: 550 - protein, 19 aa, Artificial Sequence
  SARS-CoV-2 Epitope
AQVLSEMVMCGSSLYVKPG

SEQ ID NO: 551 - protein, 22 aa, Artificial Sequence
  SARS-CoV-2 Epitope
LANECAQVLSEMVMCGGSLYVK

SEQ ID NO: 552 - protein, 26 aa, Artificial Sequence
  SARS-CoV-2 Epitope
YRLANECAQVLSETVMCGGSLYVKPG

SEQ ID NO: 553 - protein, 10 aa, Artificial Sequence
  SARS-CoV-2 Epitope
VMCGGSLYVK

SEQ ID NO: 554 - protein, 15 aa, Artificial Sequence
  SARS-CoV-2 Epitope
ALLAVFHSASKIITL

SEQ ID NO: 555 - protein, 11 aa, Artificial Sequence
  SARS-CoV-2 Epitope
YDKLQFTSLEI

SEQ ID NO: 556 - protein, 14 aa, Artificial Sequence
  SARS-CoV-2 Epitope
ISNCFADYSVLYNS

SEQ ID NO: 557 - protein, 15 aa, Artificial Sequence
  SARS-CoV-2 Epitope
ISNCVADYSFLYNSA

SEQ ID NO: 558 - protein, 16 aa, Artificial Sequence
  SARS-CoV-2 Epitope
AFKLNIKLLGVGGKPC

SEQ ID NO: 559 - protein, 8 aa, Artificial Sequence
  SARS-CoV-2 Epitope
AYKVYYGN

SEQ ID NO: 560 - protein, 18 aa, Artificial Sequence
  SARS-CoV-2 Epitope
FFYENAFLPFAMGVIAMS

SEQ ID NO: 561 - protein, 14 aa, Artificial Sequence
  SARS-CoV-2 Epitope
FLYENAFLPFAMGV

SEQ ID NO: 562 - protein, 25 aa, Artificial Sequence
  SARS-CoV-2 Epitope
VLVQSTQWSLFFFLYENAFLPFAMG

SEQ ID NO: 563 - protein, 15 aa, Artificial Sequence
  SARS-CoV-2 Epitope
RVRSVASQSIIAYTM

SEQ ID NO: 564 - protein, 20 aa, Artificial Sequence
  SARS-CoV-2 Epitope
IVKFISTCACEIVGGQIVTC

SEQ ID NO: 565 - protein, 16 aa, Artificial Sequence
  SARS-CoV-2 Epitope
RAKHYVYIGDPAQLPA

SEQ ID NO: 566 - protein, 11 aa, Artificial Sequence
  SARS-CoV-2 Epitope
CSPFTINCQKP

SEQ ID NO: 567 - protein, 15 aa, Artificial Sequence
  SARS-CoV-2 Epitope
KDQVILLNKHIDAYK

SEQ ID NO: 568 - protein, 20 aa, Artificial Sequence
  SARS-CoV-2 Epitope
VLYQGVNCTEVPVAIHSDQL

SEQ ID NO: 569 - protein, 28 aa, Artificial Sequence
  SARS-CoV-2 Epitope
MWALIISVTSNYSGVVTIVMFLARGIVF

SEQ ID NO: 570 - protein, 14 aa, Artificial Sequence
  SARS-CoV-2 Epitope
SMWALIISVTSNYS

SEQ ID NO: 571 - protein, 17 aa, Artificial Sequence
  SARS-CoV-2 Epitope
YNLLKDCSAVAKHDFFK

SEQ ID NO: 572 - protein, 12 aa, Artificial Sequence
  SARS-CoV-2 Epitope
DTSLKLKDCVMY

SEQ ID NO: 573 - protein, 14 aa, Artificial Sequence
  SARS-CoV-2 Epitope
VDTSLMKLKDCVMY

SEQ ID NO: 574 - protein, 43 aa, Artificial Sequence
  SARS-CoV-2 Epitope
ITTVAAFHQECSLQSCTQHQPYVVDDPCPIHFYSKWYIRVGAR

SEQ ID NO: 575 - protein, 26 aa, Artificial Sequence
  SARS-CoV-2 Epitope
TQHQPYVVDDPCSIHFYSKWYIRVGA

SEQ ID NO: 576 - protein, 15 aa, Artificial Sequence
  SARS-CoV-2 Epitope
PCPIHFYSKWYIRVG

SEQ ID NO: 577 - protein, 12 aa, Artificial Sequence
  SARS-CoV-2 Epitope
GVNLVAVPTGYV

SEQ ID NO: 578 - protein, 18 aa, Artificial Sequence
  SARS-CoV-2 Epitope
NSVFNICQAVTANVNALL

SEQ ID NO: 579 - protein, 12 aa, Artificial Sequence
  SARS-CoV-2 Epitope
FPLCANGQVFGL

SEQ ID NO: 580 - protein, 14 aa, Artificial Sequence
  SARS-CoV-2 Epitope
ISFPLCANGHVFGL

SEQ ID NO: 581 - protein, 20 aa, Artificial Sequence
  SARS-CoV-2 Epitope
PINLVRDLPQGFSVLEPLVD

SEQ ID NO: 582 - protein, 24 aa, Artificial Sequence
  SARS-CoV-2 Epitope
PINLVRGLPQGFSVLEPLVDLPIG

SEQ ID NO: 583 - protein, 24 aa, Artificial Sequence
  SARS-CoV-2 Epitope
PINLVRGLPQGFLALEPLVDLPIG

SEQ ID NO: 584 - protein, 16 aa, Artificial Sequence
  SARS-CoV-2 Epitope
YVYIGDPAQLPAPRTL

SEQ ID NO: 585 - protein, 14 aa, Artificial Sequence
  SARS-CoV-2 Epitope
ILLNKHIDAYKTFP

SEQ ID NO: 586 - protein, 16 aa, Artificial Sequence
  SARS-CoV-2 Epitope
LLNKHIDAYKTFPPIE

SEQ ID NO: 587 - protein, 18 aa, Artificial Sequence
  SARS-CoV-2 Epitope
QVILLNKHIDAYKIFPPT

SEQ ID NO: 588 - protein, 15 aa, Artificial Sequence
  SARS-CoV-2 Epitope
QVILLNKHIDAYKTF

SEQ ID NO: 589 - protein, 17 aa, Artificial Sequence
  SARS-CoV-2 Epitope
NLLKDCPAVAKHDFFKF

SEQ ID NO: 590 - protein, 21 aa, Artificial Sequence
  SARS-CoV-2 Epitope
AVDALCEKALKCLPIDKCSRI

SEQ ID NO: 591 - protein, 44 aa, Artificial Sequence
  SARS-CoV-2 Epitope
HFAIGLALYYPSARIVYTACSHAAVDALCEKALKYLPIDKCSRI

SEQ ID NO: 592 - protein, 16 aa, Artificial Sequence
  SARS-CoV-2 Epitope
HFSIGLALYYPSARIV

SEQ ID NO: 593 - protein, 16 aa, Artificial Sequence
  SARS-CoV-2 Epitope
FLVLLPLVSSQCVNLT

SEQ ID NO: 594 - protein, 11 aa, Artificial Sequence
  SARS-CoV-2 Epitope
LSLVSSQCVNF

SEQ ID NO: 595 - protein, 23 aa, Artificial Sequence
  SARS-CoV-2 Epitope
SDIDITFLKKDAPYIVGDVVQEG

SEQ ID NO: 596 - protein, 23 aa, Artificial Sequence
  SARS-CoV-2 Epitope
PLLYDANYFLCWHINCYDYCIPY

SEQ ID NO: 597 - protein, 16 aa, Artificial Sequence
  SARS-CoV-2 Epitope
ARSVAIQSIIAYTMSL

SEQ ID NO: 598 - protein, 17 aa, Artificial Sequence
  SARS-CoV-2 Epitope
TSGVGYQPYRVVVLSFE

SEQ ID NO: 599 - protein, 16 aa, Artificial Sequence
  SARS-CoV-2 Epitope
ATVAYFNMVYIPASWV

SEQ ID NO: 600 - protein, 14 aa, Artificial Sequence
  SARS-CoV-2 Epitope
AVAYFNMVYMPASW

SEQ ID NO: 601 - protein, 14 aa, Artificial Sequence
  SARS-CoV-2 Epitope
ASALGKLQNVVNQN

SEQ ID NO: 602 - protein, 9 aa, Artificial Sequence
  SARS-CoV-2 Epitope
ALHRSYLTP

SEQ ID NO: 603 - protein, 11 aa, Artificial Sequence
  SARS-CoV-2 Epitope
FQTLHRSYLTP

SEQ ID NO: 604 - protein, 12 aa, Artificial Sequence
  SARS-CoV-2 Epitope
FQTLLHRSYLTP

SEQ ID NO: 605 - protein, 11 aa, Artificial Sequence
  SARS-CoV-2 Epitope
FQTLYRSYLTP

SEQ ID NO: 606 - protein, 10 aa, Artificial Sequence
  SARS-CoV-2 Epitope
FQTLLALHNS

SEQ ID NO: 607 - protein, 15 aa, Artificial Sequence
  SARS-CoV-2 Epitope
PLDFVRATATIPIQA

SEQ ID NO: 608 - protein, 23 aa, Artificial Sequence
  SARS-CoV-2 Epitope
SDFVRATATIPIRASLPFGWLIV

SEQ ID NO: 609 - protein, 19 aa, Artificial Sequence
  SARS-CoV-2 Epitope
VRATATIPIQASLHFGWLI

SEQ ID NO: 610 - protein, 19 aa, Artificial Sequence
  SARS-CoV-2 Epitope
VRATATIPIQASLLFGWLI

SEQ ID NO: 611 - protein, 24 aa, Artificial Sequence
  SARS-CoV-2 Epitope
AGLEAPFLYLYALFYFLQSINFVR

SEQ ID NO: 612 - protein, 24 aa, Artificial Sequence
  SARS-CoV-2 Epitope
LYLYALVYFLQSIHFVRIIMRLWL

SEQ ID NO: 613 - protein, 14 aa, Artificial Sequence
  SARS-CoV-2 Epitope
SLVYFLQSINFVRI

SEQ ID NO: 614 - protein, 13 aa, Artificial Sequence
  SARS-CoV-2 Epitope
ISSVLNDILARLD

SEQ ID NO: 615 - protein, 10 aa, Artificial Sequence
  SARS-CoV-2 Epitope
SVLNDILSRL

SEQ ID NO: 616 - protein, 20 aa, Artificial Sequence
  SARS-CoV-2 Epitope
LSKGVHFVCNLLLFFVTVYS

SEQ ID NO: 617 - protein, 23 aa, Artificial Sequence
  SARS-CoV-2 Epitope
QLALSKGVHFVCNLLLLFVTVYS

SEQ ID NO: 618 - protein, 19 aa, Artificial Sequence
  SARS-CoV-2 Epitope
QLALSKGFHFVCNLLLLFV

SEQ ID NO: 619 - protein, 22 aa, Artificial Sequence
  SARS-CoV-2 Epitope
QLALSKGVYFVCNLLLLFVTVY

SEQ ID NO: 620 - protein, 30 aa, Artificial Sequence
  SARS-CoV-2 Epitope
IPARARVECFDKFKVNLTLEQYVFCTVNAL

SEQ ID NO: 621 - protein, 19 aa, Artificial Sequence
  SARS-CoV-2 Epitope
QVAVLYQSVNCTEVPVAIH

SEQ ID NO: 622 - protein, 20 aa, Artificial Sequence
  SARS-CoV-2 Epitope
IDKCSRIIPARAHVECFDKF

SEQ ID NO: 623 - protein, 23 aa, Artificial Sequence
  SARS-CoV-2 Epitope
LGSLVVRCSFYEDFLEYHDVRVV

SEQ ID NO: 624 - protein, 14 aa, Artificial Sequence
  SARS-CoV-2 Epitope
YEDFLEYHDVRVVL

SEQ ID NO: 625 - protein, 26 aa, Artificial Sequence
  SARS-CoV-2 Epitope
SLVLARKHTTCCILSHRFYRLANECA

SEQ ID NO: 626 - protein, 9 aa, Artificial Sequence
  SARS-CoV-2 Epitope
RLQSLQTYV

SEQ ID NO: 627 - protein, 9 aa, Artificial Sequence
  SARS-CoV-2 Epitope
LLMPILTLT

SEQ ID NO: 628 - protein, 9 aa, Artificial Sequence
  SARS-CoV-2 Epitope
SLLMPILTL

SEQ ID NO: 629 - protein, 9 aa, Artificial Sequence
  SARS-CoV-2 Epitope
VVDSYYSLL

SEQ ID NO: 630 - protein, 9 aa, Artificial Sequence
  SARS-CoV-2 Epitope
KLSYGIATV

SEQ ID NO: 631 - protein, 9 aa, Artificial Sequence
  SARS-CoV-2 Epitope
AEVQIDRLI

SEQ ID NO: 632 - protein, 9 aa, Artificial Sequence
  SARS-CoV-2 Epitope
TVYEKLKPV

SEQ ID NO: 633 - protein, 9 aa, Artificial Sequence
  SARS-CoV-2 Epitope
FLWLLWPVT

SEQ ID NO: 634 - protein, 9 aa, Artificial Sequence
  SARS-CoV-2 Epitope
FVLAAVYRI

SEQ ID NO: 635 - protein, 9 aa, Artificial Sequence
  SARS-CoV-2 Epitope
IFLWLLWPV

SEQ ID NO: 636 - protein, 9 aa, Artificial Sequence
  SARS-CoV-2 Epitope
LACFVLAAV

SEQ ID NO: 637 - protein, 9 aa, Artificial Sequence
  SARS-CoV-2 Epitope
LLWPVTLAC

SEQ ID NO: 638 - protein, 9 aa, Artificial Sequence
  SARS-CoV-2 Epitope
LWLLWPVTL

SEQ ID NO: 639 - protein, 9 aa, Artificial Sequence
  SARS-CoV-2 Epitope
PVTLACFVL

SEQ ID NO: 640 - protein, 9 aa, Artificial Sequence
  SARS-CoV-2 Epitope
RFLYIIKLI

SEQ ID NO: 641 - protein, 9 aa, Artificial Sequence
  SARS-CoV-2 Epitope
TLACFVLAA

SEQ ID NO: 642 - protein, 9 aa, Artificial Sequence
  SARS-CoV-2 Epitope
WLLWPVTLA

SEQ ID NO: 643 - protein, 9 aa, Artificial Sequence
  SARS-CoV-2 Epitope
WPVTLACFV

SEQ ID NO: 644 - protein, 9 aa, Artificial Sequence
  SARS-CoV-2 Epitope
QVVSDIDYV

SEQ ID NO: 645 - protein, 9 aa, Artificial Sequence
  SARS-CoV-2 Epitope
CLEASFNYL

SEQ ID NO: 646 - protein, 9 aa, Artificial Sequence
  SARS-CoV-2 Epitope
MFLARGIVF

SEQ ID NO: 647 - protein, 9 aa, Artificial Sequence
  SARS-CoV-2 Epitope
VTDVTQLYL

SEQ ID NO: 648 - protein, 9 aa, Artificial Sequence
  SARS-CoV-2 Epitope
APHGVVFLH

SEQ ID NO: 649 - protein, 9 aa, Artificial Sequence
  SARS-CoV-2 Epitope
FLHVTYVPA

SEQ ID NO: 650 - protein, 11 aa, Artificial Sequence
  SARS-CoV-2 Epitope
FPQSAPHGVVF

SEQ ID NO: 651 - protein, 9 aa, Artificial Sequence
  SARS-CoV-2 Epitope
HLMSFPQSA

SEQ ID NO: 652 - protein, 9 aa, Artificial Sequence
  SARS-CoV-2 Epitope
VVFLHVTYV

SEQ ID NO: 653 - protein, 9 aa, Artificial Sequence
  SARS-CoV-2 Epitope
SLPFGWLIV

SEQ ID NO: 654 - protein, 9 aa, Artificial Sequence
  SARS-CoV-2 Epitope
WLIVGVALL

SEQ ID NO: 655 - protein, 9 aa, Artificial Sequence
  SARS-CoV-2 Epitope
FTISVTTEI

SEQ ID NO: 656 - protein, 9 aa, Artificial Sequence
  SARS-CoV-2 Epitope
IPTNFTISV

SEQ ID NO: 657 - protein, 9 aa, Artificial Sequence
  SARS-CoV-2 Epitope
SVTTEILPV

SEQ ID NO: 658 - protein, 9 aa, Artificial Sequence
  SARS-CoV-2 Epitope
NTLQCIMLV

SEQ ID NO: 659 - protein, 9 aa, Artificial Sequence
  SARS-CoV-2 Epitope
FIAGLIAIV

SEQ ID NO: 660 - protein, 9 aa, Artificial Sequence
  SARS-CoV-2 Epitope
GLIAIVMVT

SEQ ID NO: 661 - protein, 9 aa, Artificial Sequence
  SARS-CoV-2 Epitope
IMLCCMTSC

SEQ ID NO: 662 - protein, 9 aa, Artificial Sequence
  SARS-CoV-2 Epitope
FSDVTWFHA

SEQ ID NO: 663 - protein, 9 aa, Artificial Sequence
  SARS-CoV-2 Epitope
FSNVTWFHA

SEQ ID NO: 664 - protein, 9 aa, Artificial Sequence
  SARS-CoV-2 Epitope
VTWFHAIHV

SEQ ID NO: 665 - protein, 9 aa, Artificial Sequence
  SARS-CoV-2 Epitope
YLGGMSYYC

SEQ ID NO: 666 - protein, 9 aa, Artificial Sequence
  SARS-CoV-2 Epitope
KLNVGDYFV

SEQ ID NO: 667 - protein, 9 aa, Artificial Sequence
  SARS-CoV-2 Epitope
LTSHTVMPL

SEQ ID NO: 668 - protein, 9 aa, Artificial Sequence
  SARS-CoV-2 Epitope
FIASFRLFA

SEQ ID NO: 669 - protein, 9 aa, Artificial Sequence
  SARS-CoV-2 Epitope
GLMWLSYFI

SEQ ID NO: 670 - protein, 9 aa, Artificial Sequence
  SARS-CoV-2 Epitope
GLMWLSYFV

SEQ ID NO: 671 - protein, 9 aa, Artificial Sequence
  SARS-CoV-2 Epitope
LMWLSYFIA

SEQ ID NO: 672 - protein, 9 aa, Artificial Sequence
  SARS-CoV-2 Epitope
LVGLMWLSY

SEQ ID NO: 673 - protein, 9 aa, Artificial Sequence
  SARS-CoV-2 Epitope
QWNLVIGFL

SEQ ID NO: 674 - protein, 9 aa, Artificial Sequence
  SARS-CoV-2 Epitope
WICLLQFAY

SEQ ID NO: 675 - protein, 9 aa, Artificial Sequence
  SARS-CoV-2 Epitope
ATSRMLSYY

SEQ ID NO: 676 - protein, 9 aa, Artificial Sequence
  SARS-CoV-2 Epitope
ATSRTLSYY

SEQ ID NO: 677 - protein, 9 aa, Artificial Sequence
  SARS-CoV-2 Epitope
YLQPRTFLL

SEQ ID NO: 678 - protein, 9 aa, Artificial Sequence
  SARS-CoV-2 Epitope
YLRPRTFLL

SEQ ID NO: 679 - protein, 9 aa, Artificial Sequence
  SARS-CoV-2 Epitope
STDTVVEHV

SEQ ID NO: 680 - protein, 9 aa, Artificial Sequence
  SARS-CoV-2 Epitope
NLLKDCPAV

SEQ ID NO: 681 - protein, 9 aa, Artificial Sequence
  SARS-CoV-2 Epitope
MVMCGGSLY

SEQ ID NO: 682 - protein, 9 aa, Artificial Sequence
  SARS-CoV-2 Epitope
RLANECAQV

SEQ ID NO: 683 - protein, 9 aa, Artificial Sequence
  SARS-CoV-2 Epitope
VMCGGSLYV

SEQ ID NO: 684 - protein, 9 aa, Artificial Sequence
  SARS-CoV-2 Epitope
ALLAVFQSA

SEQ ID NO: 685 - protein, 9 aa, Artificial Sequence
  SARS-CoV-2 Epitope
KLQFTSLEI

SEQ ID NO: 686 - protein, 15 aa, Artificial Sequence
  SARS-CoV-2 Epitope
RISNCVADYSVLYNS

SEQ ID NO: 687 - protein, 9 aa, Artificial Sequence
  SARS-CoV-2 Epitope
ALYYPSARI

SEQ ID NO: 688 - protein, 9 aa, Artificial Sequence
  SARS-CoV-2 Epitope
GLALYYPSA

SEQ ID NO: 689 - protein, 9 aa, Artificial Sequence
  SARS-CoV-2 Epitope
KLNIKLLGV

SEQ ID NO: 690 - protein, 9 aa, Artificial Sequence
  SARS-CoV-2 Epitope
FVFPLNSII

SEQ ID NO: 691 - protein, 9 aa, Artificial Sequence
  SARS-CoV-2 Epitope
FLCLFLLPS

SEQ ID NO: 692 - protein, 9 aa, Artificial Sequence
  SARS-CoV-2 Epitope
FLLPSLATV

SEQ ID NO: 693 - protein, 9 aa, Artificial Sequence
  SARS-CoV-2 Epitope
TVAYFNMVY

SEQ ID NO: 694 - protein, 9 aa, Artificial Sequence
  SARS-CoV-2 Epitope
VPYFNMVYM

SEQ ID NO: 695 - protein, 9 aa, Artificial Sequence
  SARS-CoV-2 Epitope
LMNVLTLFY

SEQ ID NO: 696 - protein, 9 aa, Artificial Sequence
  SARS-CoV-2 Epitope
LMNVLTLVY

SEQ ID NO: 697 - protein, 9 aa, Artificial Sequence
  SARS-CoV-2 Epitope
NVLTLVYKV

SEQ ID NO: 698 - protein, 9 aa, Artificial Sequence
  SARS-CoV-2 Epitope
TLMNVLTLV

SEQ ID NO: 699 - protein, 9 aa, Artificial Sequence
  SARS-CoV-2 Epitope
FLPFAMGII

SEQ ID NO: 700 - protein, 9 aa, Artificial Sequence
  SARS-CoV-2 Epitope
FLYENAFLP

SEQ ID NO: 701 - protein, 9 aa, Artificial Sequence
  SARS-CoV-2 Epitope
LVQSTQWSL

SEQ ID NO: 702 - protein, 9 aa, Artificial Sequence
  SARS-CoV-2 Epitope
STQWSLFFF

SEQ ID NO: 703 - protein, 9 aa, Artificial Sequence
  SARS-CoV-2 Epitope
TQWSLFFFL

SEQ ID NO: 704 - protein, 10 aa, Artificial Sequence
  SARS-CoV-2 Epitope
RARSVASQSI

SEQ ID NO: 705 - protein, 9 aa, Artificial Sequence
  SARS-CoV-2 Epitope
FVDGVPFVV

SEQ ID NO: 706 - protein, 9 aa, Artificial Sequence
  SARS-CoV-2 Epitope
FISTCACEI

SEQ ID NO: 707 - protein, 9 aa, Artificial Sequence
  SARS-CoV-2 Epitope
TLSEQLDFI

SEQ ID NO: 708 - protein, 9 aa, Artificial Sequence
  SARS-CoV-2 Epitope
ISDYDYYRY

SEQ ID NO: 709 - protein, 9 aa, Artificial Sequence
  SARS-CoV-2 Epitope
VYIGDPAQL

SEQ ID NO: 710 - protein, 9 aa, Artificial Sequence
  SARS-CoV-2 Epitope
APSASAFFG

SEQ ID NO: 711 - protein, 9 aa, Artificial Sequence
  SARS-CoV-2 Epitope
TVSCLPFTI

SEQ ID NO: 712 - protein, 9 aa, Artificial Sequence
  SARS-CoV-2 Epitope
YTVSCLPFT

SEQ ID NO: 713 - protein, 9 aa, Artificial Sequence
  SARS-CoV-2 Epitope
LPKEITVAT

SEQ ID NO: 714 - protein, 9 aa, Artificial Sequence
  SARS-CoV-2 Epitope
DNVILLNKH

SEQ ID NO: 715 - protein, 9 aa, Artificial Sequence
  SARS-CoV-2 Epitope
DQVILLNKH

SEQ ID NO: 716 - protein, 9 aa, Artificial Sequence
  SARS-CoV-2 Epitope
FKDQVILLN

SEQ ID NO: 717 - protein, 9 aa, Artificial Sequence
  SARS-CoV-2 Epitope
KDNVILLNK

SEQ ID NO: 718 - protein, 9 aa, Artificial Sequence
  SARS-CoV-2 Epitope
LLNKHIDAY

SEQ ID NO: 719 - protein, 9 aa, Artificial Sequence
  SARS-CoV-2 Epitope
LNKHIDAYK

SEQ ID NO: 720 - protein, 9 aa, Artificial Sequence
  SARS-CoV-2 Epitope
NVILLNKHI

SEQ ID NO: 721 - protein, 9 aa, Artificial Sequence
  SARS-CoV-2 Epitope
QVILLNKHI

SEQ ID NO: 722 - protein, 9 aa, Artificial Sequence
  SARS-CoV-2 Epitope
SVAALTNNV

SEQ ID NO: 723 - protein, 9 aa, Artificial Sequence
  SARS-CoV-2 Epitope
LTYHGAIKL

SEQ ID NO: 724 - protein, 9 aa, Artificial Sequence
  SARS-CoV-2 Epitope
TLSGTWLTY

SEQ ID NO: 725 - protein, 9 aa, Artificial Sequence
  SARS-CoV-2 Epitope
TWLTYTGAI

SEQ ID NO: 726 - protein, 9 aa, Artificial Sequence
  SARS-CoV-2 Epitope
WLTYHGAIK

SEQ ID NO: 727 - protein, 9 aa, Artificial Sequence
  SARS-CoV-2 Epitope
WLTYTGAIK

SEQ ID NO: 728 - protein, 9 aa, Artificial Sequence
  SARS-CoV-2 Epitope
YQDVNCTEV

SEQ ID NO: 729 - protein, 9 aa, Artificial Sequence
  SARS-CoV-2 Epitope
FMCVEYCPI

SEQ ID NO: 730 - protein, 9 aa, Artificial Sequence
  SARS-CoV-2 Epitope
SMWALIISV

SEQ ID NO: 731 - protein, 9 aa, Artificial Sequence
  SARS-CoV-2 Epitope
SMWALVISV

SEQ ID NO: 732 - protein, 9 aa, Artificial Sequence
  SARS-CoV-2 Epitope
RILGAGCFV

SEQ ID NO: 733 - protein, 9 aa, Artificial Sequence
  SARS-CoV-2 Epitope
VVDKYFDCY

SEQ ID NO: 734 - protein, 9 aa, Artificial Sequence
  SARS-CoV-2 Epitope
GLFKDCSKV

SEQ ID NO: 735 - protein, 9 aa, Artificial Sequence
  SARS-CoV-2 Epitope
VLSTFISAA

SEQ ID NO: 736 - protein, 9 aa, Artificial Sequence
  SARS-CoV-2 Epitope
KLKDCVMYA

SEQ ID NO: 737 - protein, 9 aa, Artificial Sequence
  SARS-CoV-2 Epitope
FYSKWYIRV

SEQ ID NO: 738 - protein, 9 aa, Artificial Sequence
  SARS-CoV-2 Epitope
QLCTQHQPY

SEQ ID NO: 739 - protein, 9 aa, Artificial Sequence
  SARS-CoV-2 Epitope
YVVDDPCPI

SEQ ID NO: 740 - protein, 9 aa, Artificial Sequence
  SARS-CoV-2 Epitope
NLDAVPTGY

SEQ ID NO: 741 - protein, 9 aa, Artificial Sequence
  SARS-CoV-2 Epitope
TMADLVYAL

SEQ ID NO: 742 - protein, 9 aa, Artificial Sequence
  SARS-CoV-2 Epitope
FTSDYYQLY

SEQ ID NO: 743 - protein, 9 aa, Artificial Sequence
  SARS-CoV-2 Epitope
HSYFTSDYY

SEQ ID NO: 744 - protein, 9 aa, Artificial Sequence
  SARS-CoV-2 Epitope
YFTSDYYQL

SEQ ID NO: 745 - protein, 9 aa, Artificial Sequence
  SARS-CoV-2 Epitope
LSDRVVFVL

SEQ ID NO: 746 - protein, 9 aa, Artificial Sequence
  SARS-CoV-2 Epitope
VLWAHGFEL

SEQ ID NO: 747 - protein, 9 aa, Artificial Sequence
  SARS-CoV-2 Epitope
SVFNICQAV

SEQ ID NO: 748 - protein, 9 aa, Artificial Sequence
  SARS-CoV-2 Epitope
FPLCANGQV

SEQ ID NO: 749 - protein, 9 aa, Artificial Sequence
  SARS-CoV-2 Epitope
TPINLVRDL

SEQ ID NO: 750 - protein, 9 aa, Artificial Sequence
  SARS-CoV-2 Epitope
GVYDYLVST

SEQ ID NO: 751 - protein, 9 aa, Artificial Sequence
  SARS-CoV-2 Epitope
YTACSHAAV

SEQ ID NO: 752 - protein, 9 aa, Artificial Sequence
  SARS-CoV-2 Epitope
CPACHNSEV

SEQ ID NO: 753 - protein, 9 aa, Artificial Sequence
  SARS-CoV-2 Epitope
YADVFHLYL

SEQ ID NO: 754 - protein, 9 aa, Artificial Sequence
  SARS-CoV-2 Epitope
YVFHLYLQY

SEQ ID NO: 755 - protein, 9 aa, Artificial Sequence
  SARS-CoV-2 Epitope
FLVLLPLVS

SEQ ID NO: 756 - protein, 9 aa, Artificial Sequence
  SARS-CoV-2 Epitope
VFLVLLPLV

SEQ ID NO: 757 - protein, 9 aa, Artificial Sequence
  SARS-CoV-2 Epitope
WPLVSSQCV

SEQ ID NO: 758 - protein, 9 aa, Artificial Sequence
  SARS-CoV-2 Epitope
APYIVGDVV

SEQ ID NO: 759 - protein, 9 aa, Artificial Sequence
  SARS-CoV-2 Epitope
FLKKDAPYI

SEQ ID NO: 760 - protein, 9 aa, Artificial Sequence
  SARS-CoV-2 Epitope
KQLPFFYYS

SEQ ID NO: 761 - protein, 9 aa, Artificial Sequence
  SARS-CoV-2 Epitope
QPYRVVVLS

SEQ ID NO: 762 - protein, 9 aa, Artificial Sequence
  SARS-CoV-2 Epitope
RVVVLSFEL

SEQ ID NO: 763 - protein, 9 aa, Artificial Sequence
  SARS-CoV-2 Epitope
VLSFELLHA

SEQ ID NO: 764 - protein, 9 aa, Artificial Sequence
  SARS-CoV-2 Epitope
FLCWHTNCY

SEQ ID NO: 765 - protein, 9 aa, Artificial Sequence
  SARS-CoV-2 Epitope
FLCWHTSCY

SEQ ID NO: 766 - protein, 9 aa, Artificial Sequence
  SARS-CoV-2 Epitope
LLYDANYFL

SEQ ID NO: 767 - protein, 9 aa, Artificial Sequence
  SARS-CoV-2 Epitope
LYDANYFLC

SEQ ID NO: 768 - protein, 9 aa, Artificial Sequence
  SARS-CoV-2 Epitope
SIIAYTMSL

SEQ ID NO: 769 - protein, 9 aa, Artificial Sequence
  SARS-CoV-2 Epitope
SIVAYTMSL

SEQ ID NO: 770 - protein, 9 aa, Artificial Sequence
  SARS-CoV-2 Epitope
SPRWYFYYL

SEQ ID NO: 771 - protein, 9 aa, Artificial Sequence
  SARS-CoV-2 Epitope
SLSSTASAL

SEQ ID NO: 772 - protein, 9 aa, Artificial Sequence
  SARS-CoV-2 Epitope
LLALHRSYL

SEQ ID NO: 773 - protein, 9 aa, Artificial Sequence
  SARS-CoV-2 Epitope
ALALLLLDR

SEQ ID NO: 774 - protein, 9 aa, Artificial Sequence
  SARS-CoV-2 Epitope
TALALLLLD

SEQ ID NO: 775 - protein, 9 aa, Artificial Sequence
  SARS-CoV-2 Epitope
IPIQASLPF

SEQ ID NO: 776 - protein, 9 aa, Artificial Sequence
  SARS-CoV-2 Epitope
IPIQASLSF

SEQ ID NO: 777 - protein, 9 aa, Artificial Sequence
  SARS-CoV-2 Epitope
ALVYFLQSI

SEQ ID NO: 778 - protein, 9 aa, Artificial Sequence
  SARS-CoV-2 Epitope
LYALVYFLH

SEQ ID NO: 779 - protein, 9 aa, Artificial Sequence
  SARS-CoV-2 Epitope
LYALVYFLQ

SEQ ID NO: 780 - protein, 9 aa, Artificial Sequence
  SARS-CoV-2 Epitope
VYFLQSINF

SEQ ID NO: 781 - protein, 9 aa, Artificial Sequence
  SARS-CoV-2 Epitope
YFLQSINFV

SEQ ID NO: 782 - protein, 9 aa, Artificial Sequence
  SARS-CoV-2 Epitope
YLYALVYFL

SEQ ID NO: 783 - protein, 9 aa, Artificial Sequence
  SARS-CoV-2 Epitope
VLNDILSRL

SEQ ID NO: 784 - protein, 9 aa, Artificial Sequence
  SARS-CoV-2 Epitope
ALSKGVHFV

SEQ ID NO: 785 - protein, 9 aa, Artificial Sequence
  SARS-CoV-2 Epitope
IPARARVEC

SEQ ID NO: 786 - protein, 9 aa, Artificial Sequence
  SARS-CoV-2 Epitope
YVFCTVNAL

SEQ ID NO: 787 - protein, 9 aa, Artificial Sequence
  SARS-CoV-2 Epitope
YYQLYSTQL

SEQ ID NO: 788 - protein, 9 aa, Artificial Sequence
  SARS-CoV-2 Epitope
FLEYHDVRV

SEQ ID NO: 789 - protein, 9 aa, Artificial Sequence
  SARS-CoV-2 Epitope
RIMASLVLA

SEQ ID NO: 790 - protein, 5 aa, Artificial Sequence
  Linker
ATLQA

SEQ ID NO: 791 - protein, 10 aa, Artificial Sequence
  Linker
PRRARSVRYP

SEQ ID NO: 792 - DNA, 8890 bp, Artificial Sequence
  From FIG. 2
ttacgcgtagtccgggacgtcgtacgggtacgcgctgttgtagaggacgctgtagtccgccacgcagttgctgatcggatagcgcacgctgcgcgcgcggcgcgggatgtggcatcggcagtagaggcagcatgatgccggatagcgcacgctgcgcgcgcggcgcggcatgctgactgggagaatctcagtcgtcacactgatcggatagcgcacgctgcgcgcgcggcgcgggagctcgaaggcgacgttcaccggcaacgtcggatagcgcacgctgcgcgcgcggcgcggcccggaggagcacggctccttgagcagcacggtggttccccgcacgcactcctggtagtggtagagctccggatagcgcacgctgcgcgcgcggcgcgggcacctcccgaggtggtgcccagcgatgcggaggtgtccccgcaagatcacagcgccgatgaccagctcggacggatagcgcacgctgcgcgcgcggcgcggcactgcagcgtagagccaagccagcacgttcactgtcggatagcgcacgctgcgcgcgcggcgcggcacgaacccaacctcgcgggttattactgccgcgatcaaggggcacgccttgtccggatagcgcacgctgcgcgcgcggcgcggctcgctcgtacagatcacgtgtcggggacacggatagcgcacgctgcgcgcgcggcgcgggaggtccacgagtggctcgagagcggagaacccctgaggcaagtcccgcaccaagttgatcggatagcgcacgctgcgcgcgcggcgcgggtcgtttgcgcaggtggttgggatctgcacgtacttgcccttgaggtcgcagaaccccttcggatagcgcacgctgcgcgcgcggcgcggggtggtaccgcacgtcacctggaccatgcagccctcaaccggatagcgcacgctgcgcgcgcggcgcggagccgtcgtcaaagggatgatgttgaggggcacgcatccgtccggatagcgcacgctgcgcgcgcggcgcggcttgatgcacggcttgcccccgacacccaacagcttgatgttgagcttgaaggccggatagcgcacgctgcgcgcgcggcgcgggtgctgccgtgcctcgctcagcacctcctcgaccggatagcgcacgctgcgcgcgcggcgcggtcccttctccacggtgaaggacttgagggtgcacggatagcgcacgctgcgcgcgcggcgcgggagctgggtgcagaaggaaccgtactgcagcggatagcgcacgctgcgcgcgcggcgcgggactccgtagcacttgaaggtggacggatagcgcacgctgcgcgcgcggcgcggggtgccgcgcaacttgagtgggaacttcggatagcgcacgctgcgcgcgcggcgcgggaagtctccgtagacgatgtgctccggatagcgcacgctgcgcgcgcggcgcgggtagcacgccagcacgctgaaggtcggatagcgcacgctgcgcgcgcggcgcgggaagaaggcgcttgcgctaggcgcgaactgtgcgatctgtggccagtgcttcggatagcgcacgctgcgcgcgcggcgcggctccgggagctgctgcacgacgccgtcgaccttcttgtagtagttgaactgggtcttgactgcctcacccggatagcgcacgctgcgcgcgcggcgcggtccgcagacggtggcgggcgcgtgcaagagctcgaagctgaggacgacgaccctgtaaggctgcggatagcgcacgctgcgcgcgcggcgcgggtccttgcaccacaacatgaagctgatctcggtcggatagcgcacgctgcgcgcgcggcgcggcatcgtgtacgcgatgatgctctgggacgcgacgctgcgcgcgctccccccccccccctgcgttgacaccagataatcgtatacgcccaatgtaaggcgtgtgccgagataataaaagtaccacctcggcttgagaaggaaagttctcggttgcagataccccacataatatgctgcggccggatagcgcacgctgcgcgcgcggcgcgggggagtgagatagctcctatggagtgccaggagggtctggaacggatagcgcacgctgcgcgcgcggcgcggcgcgaaggcacaaaaggagaggaccgtggagttggcggggacctccggatagcgcacgctgcgcgcgcggcgcgggcggacgatggactccgtgggctgcactctgaagttcggatagcgcacgctgcgcgcgcggcgcggggtgtactcgatcaactttgagggggtgtagcagatgttccccaccgctgagaacaccctgggcagcggatagcgcacgctgcgcgcgcggcgcgggaagtacttgtacttgttgtacagggccaggtacctgttgtactgggtcaacggatagcgcacgctgcgcgcgcggcgcgggtgtccgatgaccctgagctgcacgttaccagcctggaccaggaagttcggatagcgcacgctgcgcgcgcggcgcgggaagaacacggtgaggggggcgcagatggtctccggatagcgcacgctgcgcgcgcggcgcggcctggcacccactctgatgtaccacttggagtagaagtggatggggcaagggtcgtccaccacgtatggctggtgctgggtgcagctctgcaggctgcactcctggtggaacggatagcgcacgctgcgcgcgcggcgcgggctcttgctcaagttcttgatgatcaggttgatgatgtagtcgaggttccagatgctgaccttgaaggtcggatagcgcacgctgcgcgcgcggcgcgggttgttgatgatgctcacgggcacctcgcccggatagcgcacgctgcgcgcgcggcgcgggtagttagcgtgcatcacgtatcccggatagcgcacgctgcgcgcgcggcgcggctccatgtggtgcatgtagcagaagctgacgcagtcgtagtccggatagcgcacgctgcgcgcgcggcgcggaacgtcagagcgaagcttcaaatacggatagcgcacgctgcgcgcgcggcgcggggcacttgttatagaggtctggggcggctggtagagcacgtcgctcggatagcgcacgctgcgcgcgcggcgcggagcggtgtgcacggtcgcgcagtcgccgatcggatagcgcacgctgcgcgcgcggcgcggcacgcttacaccaccgaagctgcatggcgtgatgtcgaggatctccggatagcgcacgctgcgcgcgcggcgcgggtagtacacaccgaggaaggggtcgttgcagaactggaactcgcacaccttgatcaccaccggatagcgcacgctgcgcgcgcggcgcggggtcttgtagatctgcttgacctgtgcgaagacctccggatagcgcacgctgcgcgcgcggcgcgggaacgtcttgtaggcgtcgatgtgcttgttcagcaggatgacctggtccggatagcgcacgctgcgcgcgcggcgcggtcggatgacgaagctgtcagcgtagacgttggtgaagcagaggtcgttcggatagcgcacgctgcgcgcgcggcgcgggagctccttcaaggaggcgcacatgtcgaggacggcgatgccggtctgagcggacagcggacccagaatgtccacgtggtcttgggtcaaaggctcgtacggatagcgcacgctgcgcgcgcggcgcgggagcttgttgatgtccaccgcaccctgcattgagaggaggacgctcatggtggcaagccccgaggatcccgggttgtggcaagcttatcatcgtgtttttcaaaggaaaaccacgtccccgtggttcggggggcctagacgtttttttaacctcgactaaacacatgtaaagcatgtgcaccgaggccccagatcagatcccatacaatggggtaccttctgggcatccttcagccccttgttgaatacgcttgaggagagccatttgactctttccacaactatccaactcacaacgtggcactggggttgtgccgcctttgcaggtgtatcttatacacgtggcttttggccgcagaggcacctgtcgccaggtggggggttccgctgcctgcaaagggtcgctacagacgttgtttgtcttcaagaagcttccagaggaactgcttccttcacgacattcaacagaccttgcattcctttggcgagaggggaaagacccctaggaatgctcgtcaagaagacagggccaggtttccgggccctcacattgccaaaagacggcaatatggtggaaaataacatatagacaaacgcacaccggccttattccaagcggcttcggccagtaacgttaggggggggggagggagaggggggggggggagaggggcggaattggccgccctagatgcttacttgtcgtcgtcgtccttgtagtccttcgctacgttcaggctcttcttcaacttcttcagcggatagcgcacgctgcgcgcgcggcgcggagtgatcttgatagcgacggaccccccgagtgccagcttcggatagcgcacgctgcgcgcgcggcgcggcagcaccacccgaacgtcatggtattccaaaaaatcctcatagaatgaacatctgactacaagactccccagcggatagcgcacgctgcgcgcgcggcgcggttggcaattaatcgtaaatggcaagcaacttacggtatacggatagcgcacgctgcgcgcgcggcgcgggtgagtgcacagcattttcacgcagtttgttatcggatagcgcacgctgcgcgcgcggcgcggttcctgcctgatgaacaatttgggggagactgatctagcgcggagctgatacacatgtttaacgccgtccgggcatgcgaatgcaaattgtgtggagaagcaggtgagggccggatagcgcacgctgcgcgcgcggcgcggtccgaaatggatgaccctcatgttgtatgggactgcgagggtgagcgtgttaaggtactggcagagctgcgtgtactttgccggatagcgcacgctgcgcgcgcggcgcggcagtgactcgtaggccacactaccctcgagcggatagcgcacgctgcgcgcgcggcgcggctgagcgggaacgtaagtaacgtggaggaagacgacaccgtgaggagcggactgggggaagctcatgaggtggtatccctttccgcagaagtccaccggatagcgcacgctgcgcgcgcggcgcgggagctcctggaggtcgatgagggacggatagcgcacgctgcgcgcgcggcgcggcatgatgatgaggaggatctcagcgatcgtgacctggaagtcgaccagcggatagcgcacgctgcgcgcgcggcgcggtcccctcaccagcacgtctctcacctgcaggacggggagggagagctgcacgtgcggatagcgcacgctgcgcgcgcggcgcgggagggccgtcacgatgagtggccaagcgagcggatagcgcacgctgcgcgcgcggcgcggttttgcaagaagaatgtcgttgtgcagctgcacgcactgcggatagcgcacgctgcgcgcgcggcgcgggatgtctcccaggcagtcaccgtactgcttcggatagcgcacgctgcgcgcgcggcgcgggagctggtcagcgtgtatggccacggggacctcggtgcagttgacgtcctggtacggatagcgcacgctgcgcgcgcggcgcggagcgaatgggatctggagtgctgccggatagcgcacgctgcgcgcgcggcgcggccaggtacctgaaggcgtgacctccggatagcgcacgctgcgcgcgcggcgcgggagcctgtccagcagcaacaatgccagagcagccggatagcgcacgctgcgcgcgcggcgcggcaggcgtgacaagatgtcgttgagcacgctcggatagcgcacgctgcgcgcgcggcgcggtcgcgtgaggatcgttccgtggagaggcacgttcagcggatagcgcacgctgcgcgcgcggcgcgggaacttctgtgcgcagatgaggtcgcgcgcccgcagcagcaccttcctgtaggccactgggatctcaccgacgtgtgggaccaagactccgagcggatagcgcacgctgcgcgcgcggcgcggcttgttcaccacgttgaaggcgaccggatagcgcacgctgcgcgcgcggcgcggctgcgccgtggcgaacgcagcgtaggaggggagggaggagaactcggacggatagcgcacgctgcgcgcgcggcgcgggaaggtggtcaccacccgcacggacccctccatggtggcaagccccgaggatcccgggttgtggcaagcttatcatcgtgtttttcaaaggaaaaccacgtccccgtggttcggggggcctagacgtttttttaacctcgactaaacacatgtaaagcatgtgcaccgaggccccagatcagatcccatacaatggggtaccttctgggcatccttcagccccttgttgaatacgcttgaggagagccatttgactctttccacaactatccaactcacaacgtggcactggggttgtgccgcctttgcaggtgtatcttatacacgtggcttttggccgcagaggcacctgtcgccaggtggggggttccgctgcctgcaaagggtcgctacagacgttgtttgtcttcaagaagcttccagaggaactgcttccttcacgacattcaacagaccttgcattcctttggcgagaggggaaagacccctaggaatgctcgtcaagaagacagggccaggtttccgggccctcacattgccaaaagacggcaatatggtggaaaataacatatagacaaacgcacaccggccttattccaagcggcttcggccagtaacgttaggggggggggagggagaggggggggggggagaggggcggaattggccgccctagatgcttactcggtcaggcggcggcgcagctcctcctccaggcggctgaagagggagtaagaagagagctggatcggatagcgcacgctgcgcgcgcggcgcgggccggcggcgcaggacatctgcctgagcgcgacgggggacagcggatagcgcacgctgcgcgcgcggcgcgggtcggtgacgaatctgcacggcggctccaactccgtgtacggatagcgcacgctgcgcgcgcggcgcggccaggcgatgacgcatcccgtgaacggatagcgcacgctgcgcgcgcggcgcgggttctggttgaccacgtcctggagcttaccgagggccggatagcgcacgctgcgcgcgcggcgcgggagtgcgccgattggctggatgagtggggtcggatagcgcacgctgcgcgcgcggcgcgggaggttcttgacccttgagtagacgtagaaggacggcttgacgagggagacgttgacgatgttgcagcagtaggcgcagagccgcggatagcgcacgctgcgcgcgcggcgcggcttcaggcaggagcagcaggacgtcggatagcgcacgctgcgcgcgcggcgcggcttgaatatcgtgcactccgcggccagcacgcacgcggaggtcggatagcgcacgctgcgcgcgcggcgcggcgcggccctgatcagctgctgcgtgacgtaggtctggagggactggagcggatagcgcacgctgcgcgcgcggcgcggcatcaggaacggctggctgacgtactcgaacggatagcgcacgctgcgcgcgcggcgcggtatgaagtagaggtacttgaccttggggcccggatagcgcacgctgcgcgcgcggcgcgggaacccgtaggactgcagcgggaagtagcagttgaacggatagcgcacgctgcgcgcgcggcgcggcaaggcgcagtcgaccgcgtcggtcggatagcgcacgctgcgcgcgcggcgcggcgcgaccctctgggaggcgccgagcttgtagtaggagagcgtcctgctggtcgcgacggtgatctccttcgggaggtccttgatcggatagcgcacgctgcgcgcgcggcgcgggaggcatcccgcccgcgtctggaagacgttggaccccggatagcgcacgctgcgcgcgcggcgcggcagccggtcgatctggacctcggccggatagcgcacgctgcgcgcgcggcgcggcaggtagttgcacccgatcaagaaggcctcgctcggatagcgcacgctgcgcgcgcggcgcggggacaccacgctgaggtcctggctcggatagcgcacgctgcgcgcgcggcgcgggctcacgtggatcgcgtggaaccaggtgacgttggagaagaacggatagcgcacgctgcgcgcgcggcgcggcgcgaagtagaccccgtcgttgaagggcagcaccggatagcgcacgctgcgcgcgcggcgcggcttgcagcaggacccgcaggagcacggatagcgcacgctgcgcgcgcggcgcggcaccgtcgccgccaaggaccccaagaccggatagcgcacgctgcgcgcgcggcgcgggaagagctcgacgtcgaccccgtcgaccttggtcggatagcgcacgctgcgcgcgcggcgcgggtcccagatcacggtgttggccgcgatgtccacgcccaggttgttcaggatcttcggatagcgcacgctgcgcgcgcggcgcgggtagtccgggatcaccaccatcagcggatagcgcacgctgcgcgcgcggcgcggcacgccgctgcactggcgcaccacgtcgaactcgctcagctgcggatagcgcacgctgcgcgcgcggcgcggcacgatcttgctgtccgcgtccaccacctgctggatctcccacagcgcgctcgcgtaggtcatggtggc

SEQ ID NO: 793 - DNA, 5950 bp, Artificial Sequence
  From FIG.4
gccaccatgacctacgcgagcgcgctgtgggagatccagcaggtggtggacgcggacagcaagatcgtgcagctgagcgagttcgacgtggtgcgccagtgcagcggcgtgctgatggtggtgatcccggactacaagatcctgaacaacctgggcgtggacatcgcggccaacaccgtgatctgggacaccaaggtcgacggggtcgacgtcgagctcttcgtcttggggtccttggcggcgacggtgtgctcctgcgggtcctgctgcaaggtgctgcccttcaacgacggggtctacttcgcgttcttctccaacgtcacctggttccacgcgatccacgtgagcagccaggacctcagcgtggtgtccagcgaggccttcttgatcgggtgcaactacctggccgaggtccagatcgaccggctggggtccaacgtcttccagacgcgggcgggatgcctcatcaaggacctcccgaaggagatcaccgtcgcgaccagcaggacgctctcctactacaagctcggcgcctcccagagggtcgcgaccgacgcggtcgactgcgccttgttcaactgctacttcccgctgcagtcctacgggttcggccccaaggtcaagtacctctacttcatattcgagtacgtcagccagccgttcctgatgctccagtccctccagacctacgtcacgcagcagctgatcagggccgcgacctccgcgtgcgtgctggccgcggagtgcacgatattcaagacgtcctgctgctcctgcctgaagcggctctgcgcctactgctgcaacatcgtcaacgtctccctcgtcaagccgtccttctacgtctactcaagggtcaagaacctcaccccactcatccagccaatcggcgcactcgccctcggtaagctccaggacgtggtcaaccagaacttcacgggatgcgtcatcgcctggtacacggagttggagccgccgtgcagattcgtcaccgacctgtcccccgtcgcgctcaggcagatgtcctgcgccgccggcatccagctctcttcttactccctcttcagccgcctggaggaggagctgcgccgccgcctgaccgagtaagcatctagggcggccaattccgcccctctcccccccccccctctccctcccccccccctaacgttactggccgaagccgcttggaataaggccggtgtgcgtttgtctatatgttattttccaccatattgccgtcttttggcaatgtgagggcccggaaacctggccctgtcttcttgacgagcattcctaggggtctttcccctctcgccaaaggaatgcaaggtctgttgaatgtcgtgaaggaagcagttcctctggaagcttcttgaagacaaacaacgtctgtagcgaccctttgcaggcagcggaaccccccacctggcgacaggtgcctctgcggccaaaagccacgtgtataagatacacctgcaaaggcggcacaaccccagtgccacgttgtgagttggatagttgtggaaagagtcaaatggctctcctcaagcgtattcaacaaggggctgaaggatgcccagaaggtaccccattgtatgggatctgatctggggcctcggtgcacatgctttacatgtgtttagtcgaggttaaaaaaacgtctaggccccccgaaccacggggacgtggttttcctttgaaaaacacgatgataagcttgccacaacccgggatcctcggggcttgccaccatggaggggtccgtgcgggtggtgaccaccttctccgagttctcctccctcccctcctacgctgcgttcgccacggcgcaggtcgccttcaacgtggtgaacaagctcggagtcttggtcccacacgtcggtgagatcccagtggcctacaggaaggtgctgctgcgggcgcgcgacctcatctgcgcacagaagttcctgaacgtgcctctccacggaacgatcctcacgcgaagcgtgctcaacgacatcttgtcacgcctggctgctctggcattgttgctgctggacaggctcgaggtcacgccttcaggtacctgggcagcactccagatcccattcgcttaccaggacgtcaactgcaccgaggtccccgtggccatacacgctgaccagctcaagcagtacggtgactgcctgggagacatccagtgcgtgcagctgcacaacgacattcttcttgcaaaactcgcttggccactcatcgtgacggccctccacgtgcagctctccctccccgtcctgcaggtgagagacgtgctggtgaggggactggtcgacttccaggtcacgatcgctgagatcctcctcatcatcatgtccctcatcgacctccaggagctcgtggacttctgcggaaagggataccacctcatgagcttcccccagtccgctcctcacggtgtcgtcttcctccacgttacttacgttcccgctcagctcgagggtagtgtggcctacgagtcactggcaaagtacacgcagctctgccagtaccttaacacgctcaccctcgcagtcccatacaacatgagggtcatccatttcggagccctcacctgcttctccacacaatttgcattcgcatgcccggacggcgttaaacatgtgtatcagctccgcgctagatcagtctcccccaaattgttcatcaggcaggaaataacaaactgcgtgaaaatgctgtgcactcactataccgtaagttgcttgccatttacgattaattgccaactggggagtcttgtagtcagatgttcattctatgaggattttttggaataccatgacgttcgggtggtgctgaagctggcactcggggggtccgtcgctatcaagatcactctgaagaagttgaagaagagcctgaacgtagcgaaggactacaaggacgacgacgacaagtaagcatctagggcggccaattccgcccctctcccccccccccctctccctcccccccccctaacgttactggccgaagccgcttggaataaggccggtgtgcgtttgtctatatgttattttccaccatattgccgtcttttggcaatgtgagggcccggaaacctggccctgtcttcttgacgagcattcctaggggtctttcccctctcgccaaaggaatgcaaggtctgttgaatgtcgtgaaggaagcagttcctctggaagcttcttgaagacaaacaacgtctgtagcgaccctttgcaggcagcggaaccccccacctggcgacaggtgcctctgcggccaaaagccacgtgtataagatacacctgcaaaggcggcacaaccccagtgccacgttgtgagttggatagttgtggaaagagtcaaatggctctcctcaagcgtattcaacaaggggctgaaggatgcccagaaggtaccccattgtatgggatctgatctggggcctcggtgcacatgctttacatgtgtttagtcgaggttaaaaaaacgtctaggccccccgaaccacggggacgtggttttcctttgaaaaacacgatgataagcttgccacaacccgggatcctcggggcttgccaccatgagcgtcctcctctcaatgcagggtgcggtggacatcaacaagctctacgagcctttgacccaagaccacgtggacattctgggtccgctgtccgctcagaccggcatcgccgtcctcgacatgtgcgcctccttgaaggagctcaacgacctctgcttcaccaacgtctacgctgacagcttcgtcatccgagaccaggtcatcctgctgaacaagcacatcgacgcctacaagacgttcgaggtcttcgcacaggtcaagcagatctacaagaccgtggtgatcaaggtgtgcgagttccagttctgcaacgaccccttcctcggtgtgtactacgagatcctcgacatcacgccatgcagcttcggtggtgtaagcgtgatcggcgactgcgcgaccgtgcacaccgctagcgacgtgctctaccagccgccccagacctctataacaagtgcctatttgaagcttcgctctgacgttgactacgactgcgtcagcttctgctacatgcaccacatggagggatacgtgatgcacgctaactacggcgaggtgcccgtgagcatcatcaacaacaccttcaaggtcagcatctggaacctcgactacatcatcaacctgatcatcaagaacttgagcaagagcttccaccaggagtgcagcctgcagagctgcacccagcaccagccatacgtggtggacgacccttgccccatccacttctactccaagtggtacatcagagtgggtgccagggagaccatctgcgcccccctcaccgtgttcttcaacttcctggtccaggctggtaacgtgcagctcagggtcatcggacacttgacccagtacaacaggtacctggccctgtacaacaagtacaagtacttcctgcccagggtgttctcagcggtggggaacatctgctacaccccctcaaagttgatcgagtacaccaacttcagagtgcagcccacggagtccatcgtccgcgaggtccccgccaactccacggtcctctccttttgtgccttcgcgttccagaccctcctggcactccataggagctatctcactcccgccgcagcatattatgtggggtatctgcaaccgagaactttccttctcaagccgaggtggtacttttattatctcggcacacgccttacattgggcgtatacgattatctggtgtcaacgcagggggggggggggagcgcgcgcagcgtcgcgtcccagagcatcatcgcgtacacgatgaccgagatcagcttcatgttgtggtgcaaggaccagccttacagggtcgtcgtcctcagcttcgagctcttgcacgcgcccgccaccgtctgcggaggtgaggcagtcaagacccagttcaactactacaagaaggtcgacggcgtcgtgcagcagctcccggagaagcactggccacagatcgcacagttcgcgcctagcgcaagcgccttcttcaccttcagcgtgctggcgtgctacgagcacatcgtctacggagacttcaagttcccactcaagttgcgcggcacctccaccttcaagtgctacggagtcctgcagtacggttccttctgcacccagctctgcaccctcaagtccttcaccgtggagaagggagtcgaggaggtgctgagcgaggcacggcagcacgccttcaagctcaacatcaagctgttgggtgtcgggggcaagccgtgcatcaaggacggatgcgtgcccctcaacatcatccctttgacgacggctgttgagggctgcatggtccaggtgacgtgcggtaccaccaaggggttctgcgacctcaagggcaagtacgtgcagatcccaaccacctgcgcaaacgacatcaacttggtgcgggacttgcctcaggggttctccgctctcgagccactcgtggacctctgtccccgacacgtgatctgtacgagcgaggacaaggcgtgccccttgatcgcggcagtaataacccgcgaggttgggttcgtgacagtgaacgtgctggcttggctctacgctgcagtgtccgagctggtcatcggcgctgtgatcttgcggggacacctccgcatcgctgggcaccacctcgggaggtgcgagctctaccactaccaggagtgcgtgcggggaaccaccgtgctgctcaaggagccgtgctcctccgggacgttgccggtgaacgtcgccttcgagctcatcagtgtgacgactgagattctcccagtcagcatggcatcatgctgcctctactgccgatgccacatcatcagcaactgcgtggcggactacagcgtcctctacaacagcgcgtacccgtacgacgtcccggactacgcgtaa

SEQ ID NO: 794 - DNA, 9619 bp, Artificial Sequence
  From FIG. 6
gccaccatggcggtgatggcgccgcgcaccctgctgctgctgctgagcggcgcgctggcgctgacccagacctgggcgacctacgcgagcgcgctgtgggagatccagcaggtggtggacgcggacagcaagatcgtgccgcgccgcgcgcgcagcgtgcgctatccgcagctgagcgagttcgacgtggtgcgccagtgcagcggcgtgccgcgccgcgcgcgcagcgtgcgctatccgctgatggtggtgatcccggactacccgcgccgcgcgcgcagcgtgcgctatccgaagatcctgaacaacctgggcgtggacatcgcggccaacaccgtgatctgggacccgcgccgcgcgcgcagcgtgcgctatccgaccaaggtcgacggggtcgacgtcgagctcttcccgcgccgcgcgcgcagcgtgcgctatccggtcttggggtccttggcggcgacggtgccgcgccgcgcgcgcagcgtgcgctatccgtgctcctgcgggtcctgctgcaagccgcgccgcgcgcgcagcgtgcgctatccggtgctgcccttcaacgacggggtctacttcgcgccgcgccgcgcgcgcagcgtgcgctatccgttcttctccaacgtcacctggttccacgcgatccacgtgagcccgcgccgcgcgcgcagcgtgcgctatccgagccaggacctcagcgtggtgtccccgcgccgcgcgcgcagcgtgcgctatccgagcgaggccttcttgatcgggtgcaactacctgccgcgccgcgcgcgcagcgtgcgctatccggccgaggtccagatcgaccggctgccgcgccgcgcgcgcagcgtgcgctatccggggtccaacgtcttccagacgcgggcgggatgcctcccgcgccgcgcgcgcagcgtgcgctatccgatcaaggacctcccgaaggagatcaccgtcgcgaccagcaggacgctctcctactacaagctcggcgcctcccagagggtcgcgccgcgccgcgcgcgcagcgtgcgctatccgaccgacgcggtcgactgcgccttgccgcgccgcgcgcgcagcgtgcgctatccgttcaactgctacttcccgctgcagtcctacgggttcccgcgccgcgcgcgcagcgtgcgctatccgggccccaaggtcaagtacctctacttcataccgcgccgcgcgcgcagcgtgcgctatccgttcgagtacgtcagccagccgttcctgatgccgcgccgcgcgcgcagcgtgcgctatccgctccagtccctccagacctacgtcacgcagcagctgatcagggccgcgccgcgccgcgcgcgcagcgtgcgctatccgacctccgcgtgcgtgctggccgcggagtgcacgatattcaagccgcgccgcgcgcgcagcgtgcgctatccgacgtcctgctgctcctgcctgaagccgcgccgcgcgcgcagcgtgcgctatccgcggctctgcgcctactgctgcaacatcgtcaacgtctccctcgtcaagccgtccttctacgtctactcaagggtcaagaacctcccgcgccgcgcgcgcagcgtgcgctatccgaccccactcatccagccaatcggcgcactcccgcgccgcgcgcgcagcgtgcgctatccggccctcggtaagctccaggacgtggtcaaccagaacccgcgccgcgcgcgcagcgtgcgctatccgttcacgggatgcgtcatcgcctggccgcgccgcgcgcgcagcgtgcgctatccgtacacggagttggagccgccgtgcagattcgtcaccgacccgcgccgcgcgcgcagcgtgcgctatccgctgtcccccgtcgcgctcaggcagatgtcctgcgccgccggcccgcgccgcgcgcgcagcgtgcgctatccgatccagctctcttcttactccctcttcagccgcctggaggaggagctgcgccgccgcctgaccgagattgtgggcattattgcgggcctggtgctgctgggcgcggtgattaccggcgcggtggtggcggcggtgatgtggcgccgcaaaagcagcgatcgcaaaggcggcagctatacccaggcggcgagcagcgatagcgcgcagggcagcgatgtgagcctgaccgcgtgcaaagtgtaagcatctagggcggccaattccgcccctctcccccccccccctctccctcccccccccctaacgttactggccgaagccgcttggaataaggccggtgtgcgtttgtctatatgttattttccaccatattgccgtcttttggcaatgtgagggcccggaaacctggccctgtcttcttgacgagcattcctaggggtctttcccctctcgccaaaggaatgcaaggtctgttgaatgtcgtgaaggaagcagttcctctggaagcttcttgaagacaaacaacgtctgtagcgaccctttgcaggcagcggaaccccccacctggcgacaggtgcctctgcggccaaaagccacgtgtataagatacacctgcaaaggcggcacaaccccagtgccacgttgtgagttggatagttgtggaaagagtcaaatggctctcctcaagcgtattcaacaaggggctgaaggatgcccagaaggtaccccattgtatgggatctgatctggggcctcggtgcacatgctttacatgtgtttagtcgaggttaaaaaaacgtctaggccccccgaaccacggggacgtggttttcctttgaaaaacacgatgataagcttgccacaacccgggatcctcggggcttgccaccatggcggtgatggcgccgcgcaccctgctgctgctgctgagcggcgcgctggcgctgacccagacctgggcggaggggtccgtgcgggtggtgaccaccttcccgcgccgcgcgcgcagcgtgcgctatccgtccgagttctcctccctcccctcctacgctgcgttcgccacggcgcagccgcgccgcgcgcgcagcgtgcgctatccggtcgccttcaacgtggtgaacaagccgcgccgcgcgcgcagcgtgcgctatccgctcggagtcttggtcccacacgtcggtgagatcccagtggcctacaggaaggtgctgctgcgggcgcgcgacctcatctgcgcacagaagttcccgcgccgcgcgcgcagcgtgcgctatccgctgaacgtgcctctccacggaacgatcctcacgcgaccgcgccgcgcgcgcagcgtgcgctatccgagcgtgctcaacgacatcttgtcacgcctgccgcgccgcgcgcgcagcgtgcgctatccggctgctctggcattgttgctgctggacaggctcccgcgccgcgcgcgcagcgtgcgctatccggaggtcacgccttcaggtacctggccgcgccgcgcgcgcagcgtgcgctatccggcagcactccagatcccattcgctccgcgccgcgcgcgcagcgtgcgctatccgtaccaggacgtcaactgcaccgaggtccccgtggccatacacgctgaccagctcccgcgccgcgcgcgcagcgtgcgctatccgaagcagtacggtgactgcctgggagacatcccgcgccgcgcgcgcagcgtgcgctatccgcagtgcgtgcagctgcacaacgacattcttcttgcaaaaccgcgccgcgcgcgcagcgtgcgctatccgctcgcttggccactcatcgtgacggccctcccgcgccgcgcgcgcagcgtgcgctatccgcacgtgcagctctccctccccgtcctgcaggtgagagacgtgctggtgaggggaccgcgccgcgcgcgcagcgtgcgctatccgctggtcgacttccaggtcacgatcgctgagatcctcctcatcatcatgccgcgccgcgcgcgcagcgtgcgctatccgtccctcatcgacctccaggagctcccgcgccgcgcgcgcagcgtgcgctatccggtggacttctgcggaaagggataccacctcatgagcttcccccagtccgctcctcacggtgtcgtcttcctccacgttacttacgttcccgctcagccgcgccgcgcgcgcagcgtgcgctatccgctcgagggtagtgtggcctacgagtcactgccgcgccgcgcgcgcagcgtgcgctatccggcaaagtacacgcagctctgccagtaccttaacacgctcaccctcgcagtcccatacaacatgagggtcatccatttcggaccgcgccgcgcgcgcagcgtgcgctatccggccctcacctgcttctccacacaatttgcattcgcatgcccggacggcgttaaacatgtgtatcagctccgcgctagatcagtctcccccaaattgttcatcaggcaggaaccgcgccgcgcgcgcagcgtgcgctatccgataacaaactgcgtgaaaatgctgtgcactcacccgcgccgcgcgcgcagcgtgcgctatccgtataccgtaagttgcttgccatttacgattaattgccaaccgcgccgcgcgcgcagcgtgcgctatccgctggggagtcttgtagtcagatgttcattctatgaggattttttggaataccatgacgttcgggtggtgctgccgcgccgcgcgcgcagcgtgcgctatccgaagctggcactcggggggtccgtcgctatcaagatcactccgcgccgcgcgcgcagcgtgcgctatccgctgaagaagttgaagaagagcctgaacgtagcgaaggactacaaggacgacgacgacaagattgtgggcattattgcgggcctggtgctgctgggcgcggtgattaccggcgcggtggtggcggcggtgatgtggcgccgcaaaagcagcgatcgcaaaggcggcagctatacccaggcggcgagcagcgatagcgcgcagggcagcgatgtgagcctgaccgcgtgcaaagtgtaagcatctagggcggccaattccgcccctctcccccccccccctctccctcccccccccctaacgttactggccgaagccgcttggaataaggccggtgtgcgtttgtctatatgttattttccaccatattgccgtcttttggcaatgtgagggcccggaaacctggccctgtcttcttgacgagcattcctaggggtctttcccctctcgccaaaggaatgcaaggtctgttgaatgtcgtgaaggaagcagttcctctggaagcttcttgaagacaaacaacgtctgtagcgaccctttgcaggcagcggaaccccccacctggcgacaggtgcctctgcggccaaaagccacgtgtataagatacacctgcaaaggcggcacaaccccagtgccacgttgtgagttggatagttgtggaaagagtcaaatggctctcctcaagcgtattcaacaaggggctgaaggatgcccagaaggtaccccattgtatgggatctgatctggggcctcggtgcacatgctttacatgtgtttagtcgaggttaaaaaaacgtctaggccccccgaaccacggggacgtggttttcctttgaaaaacacgatgataagcttgccacaacccgggatcctcggggcttgccaccatggcggtgatggcgccgcgcaccctgctgctgctgctgagcggcgcgctggcgctgacccagacctgggcgagcgtcctcctctcaatgcagggtgcggtggacatcaacaagctcccgcgccgcgcgcgcagcgtgcgctatccgtacgagcctttgacccaagaccacgtggacattctgggtccgctgtccgctcagaccggcatcgccgtcctcgacatgtgcgcctccttgaaggagctcccgcgccgcgcgcgcagcgtgcgctatccgaacgacctctgcttcaccaacgtctacgctgacagcttcgtcatccgaccgcgccgcgcgcgcagcgtgcgctatccggaccaggtcatcctgctgaacaagcacatcgacgcctacaagacgttcccgcgccgcgcgcgcagcgtgcgctatccggaggtcttcgcacaggtcaagcagatctacaagaccccgcgccgcgcgcgcagcgtgcgctatccggtggtgatcaaggtgtgcgagttccagttctgcaacgaccccttcctcggtgtgtactacccgcgccgcgcgcgcagcgtgcgctatccggagatcctcgacatcacgccatgcagcttcggtggtgtaagcgtgccgcgccgcgcgcgcagcgtgcgctatccgatcggcgactgcgcgaccgtgcacaccgctccgcgccgcgcgcgcagcgtgcgctatccgagcgacgtgctctaccagccgccccagacctctataacaagtgccccgcgccgcgcgcgcagcgtgcgctatccgtatttgaagcttcgctctgacgttccgcgccgcgcgcgcagcgtgcgctatccggactacgactgcgtcagcttctgctacatgcaccacatggagccgcgccgcgcgcgcagcgtgcgctatccgggatacgtgatgcacgctaactacccgcgccgcgcgcgcagcgtgcgctatccgggcgaggtgcccgtgagcatcatcaacaacccgcgccgcgcgcgcagcgtgcgctatccgaccttcaaggtcagcatctggaacctcgactacatcatcaacctgatcatcaagaacttgagcaagagcccgcgccgcgcgcgcagcgtgcgctatccgttccaccaggagtgcagcctgcagagctgcacccagcaccagccatacgtggtggacgacccttgccccatccacttctactccaagtggtacatcagagtgggtgccaggccgcgccgcgcgcgcagcgtgcgctatccggagaccatctgcgcccccctcaccgtgttcttcccgcgccgcgcgcgcagcgtgcgctatccgaacttcctggtccaggctggtaacgtgcagctcagggtcatcggacacccgcgccgcgcgcgcagcgtgcgctatccgttgacccagtacaacaggtacctggccctgtacaacaagtacaagtacttcccgcgccgcgcgcgcagcgtgcgctatccgctgcccagggtgttctcagcggtggggaacatctgctacaccccctcaaagttgatcgagtacaccccgcgccgcgcgcgcagcgtgcgctatccgaacttcagagtgcagcccacggagtccatcgtccgcccgcgccgcgcgcgcagcgtgcgctatccggaggtccccgccaactccacggtcctctccttttgtgccttcgcgccgcgccgcgcgcgcagcgtgcgctatccgttccagaccctcctggcactccataggagctatctcactcccccgcgccgcgcgcgcagcgtgcgctatccggccgcagcatattatgtggggtatctgcaaccgagaactttccttctcaagccgaggtggtacttttattatctcggcacacgccttacattgggcgtatacgattatctggtgtcaacgcagggggggggggggagcgcgcgcagcgtcgcgtcccagagcatcatcgcgtacacgatgccgcgccgcgcgcgcagcgtgcgctatccgaccgagatcagcttcatgttgtggtgcaaggacccgcgccgcgcgcgcagcgtgcgctatccgcagccttacagggtcgtcgtcctcagcttcgagctcttgcacgcgcccgccaccgtctgcggaccgcgccgcgcgcgcagcgtgcgctatccgggtgaggcagtcaagacccagttcaactactacaagaaggtcgacggcgtcgtgcagcagctcccggagccgcgccgcgcgcgcagcgtgcgctatccgaagcactggccacagatcgcacagttcgcgcctagcgcaagcgccttcttcccgcgccgcgcgcgcagcgtgcgctatccgaccttcagcgtgctggcgtgctacccgcgccgcgcgcgcagcgtgcgctatccggagcacatcgtctacggagacttcccgcgccgcgcgcgcagcgtgcgctatccgaagttcccactcaagttgcgcggcaccccgcgccgcgcgcgcagcgtgcgctatccgtccaccttcaagtgctacggagtcccgcgccgcgcgcgcagcgtgcgctatccgctgcagtacggttccttctgcacccagctcccgcgccgcgcgcgcagcgtgcgctatccgtgcaccctcaagtccttcaccgtggagaagggaccgcgccgcgcgcgcagcgtgcgctatccggtcgaggaggtgctgagcgaggcacggcagcacccgcgccgcgcgcgcagcgtgcgctatccggccttcaagctcaacatcaagctgttgggtgtcgggggcaagccgtgcatcaagccgcgccgcgcgcgcagcgtgcgctatccggacggatgcgtgcccctcaacatcatccctttgacgacggctccgcgccgcgcgcgcagcgtgcgctatccggttgagggctgcatggtccaggtgacgtgcggtaccaccccgcgccgcgcgcgcagcgtgcgctatccgaaggggttctgcgacctcaagggcaagtacgtgcagatcccaaccacctgcgcaaacgacccgcgccgcgcgcgcagcgtgcgctatccgatcaacttggtgcgggacttgcctcaggggttctccgctctcgagccactcgtggacctcccgcgccgcgcgcgcagcgtgcgctatccgtgtccccgacacgtgatctgtacgagcgagccgcgccgcgcgcgcagcgtgcgctatccggacaaggcgtgccccttgatcgcggcagtaataacccgcgaggttgggttcgtgccgcgccgcgcgcgcagcgtgcgctatccgacagtgaacgtgctggcttggctctacgctgcagtgccgcgccgcgcgcgcagcgtgcgctatccgtccgagctggtcatcggcgctgtgatcttgcggggacacctccgcatcgctgggcaccacctcgggaggtgcccgcgccgcgcgcgcagcgtgcgctatccggagctctaccactaccaggagtgcgtgcggggaaccaccgtgctgctcaaggagccgtgctcctccgggccgcgccgcgcgcgcagcgtgcgctatccgacgttgccggtgaacgtcgccttcgagctcccgcgccgcgcgcgcagcgtgcgctatccgatcagtgtgacgactgagattctcccagtcagcatgccgcgccgcgcgcgcagcgtgcgctatccggcatcatgctgcctctactgccgatgccacatcccgcgccgcgcgcgcagcgtgcgctatccgatcagcaactgcgtggcggactacagcgtcctctacaacagcgcgtacccgtacgacgtcccggactacgcgattgtgggcattattgcgggcctggtgctgctgggcgcggtgattaccggcgcggtggtggcggcggtgatgtggcgccgcaaaagcagcgatcgcaaaggcggcagctatacccaggcggcgagcagcgatagcgcgcagggcagcgatgtgagcctgaccgcgtgcaaagtgtaa

SEQ ID NO: 795 - DNA, 6679 bp, Artificial Sequence
  From FIG 8
gccaccatggcggtgatggcgccgcgcaccctgctgctgctgctgagcggcgcgctggcgctgacccagacctgggcgacctacgcgagcgcgctgtgggagatccagcaggtggtggacgcggacagcaagatcgtgcagctgagcgagttcgacgtggtgcgccagtgcagcggcgtgctgatggtggtgatcccggactacaagatcctgaacaacctgggcgtggacatcgcggccaacaccgtgatctgggacaccaaggtcgacggggtcgacgtcgagctcttcgtcttggggtccttggcggcgacggtgtgctcctgcgggtcctgctgcaaggtgctgcccttcaacgacggggtctacttcgcgttcttctccaacgtcacctggttccacgcgatccacgtgagcagccaggacctcagcgtggtgtccagcgaggccttcttgatcgggtgcaactacctggccgaggtccagatcgaccggctggggtccaacgtcttccagacgcgggcgggatgcctcatcaaggacctcccgaaggagatcaccgtcgcgaccagcaggacgctctcctactacaagctcggcgcctcccagagggtcgcgaccgacgcggtcgactgcgccttgttcaactgctacttcccgctgcagtcctacgggttcggccccaaggtcaagtacctctacttcatattcgagtacgtcagccagccgttcctgatgctccagtccctccagacctacgtcacgcagcagctgatcagggccgcgacctccgcgtgcgtgctggccgcggagtgcacgatattcaagacgtcctgctgctcctgcctgaagcggctctgcgcctactgctgcaacatcgtcaacgtctccctcgtcaagccgtccttctacgtctactcaagggtcaagaacctcaccccactcatccagccaatcggcgcactcgccctcggtaagctccaggacgtggtcaaccagaacttcacgggatgcgtcatcgcctggtacacggagttggagccgccgtgcagattcgtcaccgacctgtcccccgtcgcgctcaggcagatgtcctgcgccgccggcatccagctctcttcttactccctcttcagccgcctggaggaggagctgcgccgccgcctgaccgagattgtgggcattattgcgggcctggtgctgctgggcgcggtgattaccggcgcggtggtggcggcggtgatgtggcgccgcaaaagcagcgatcgcaaaggcggcagctatacccaggcggcgagcagcgatagcgcgcagggcagcgatgtgagcctgaccgcgtgcaaagtgtaagcatctagggcggccaattccgcccctctcccccccccccctctccctcccccccccctaacgttactggccgaagccgcttggaataaggccggtgtgcgtttgtctatatgttattttccaccatattgccgtcttttggcaatgtgagggcccggaaacctggccctgtcttcttgacgagcattcctaggggtctttcccctctcgccaaaggaatgcaaggtctgttgaatgtcgtgaaggaagcagttcctctggaagcttcttgaagacaaacaacgtctgtagcgaccctttgcaggcagcggaaccccccacctggcgacaggtgcctctgcggccaaaagccacgtgtataagatacacctgcaaaggcggcacaaccccagtgccacgttgtgagttggatagttgtggaaagagtcaaatggctctcctcaagcgtattcaacaaggggctgaaggatgcccagaaggtaccccattgtatgggatctgatctggggcctcggtgcacatgctttacatgtgtttagtcgaggttaaaaaaacgtctaggccccccgaaccacggggacgtggttttcctttgaaaaacacgatgataagcttgccacaacccgggatcctcggggcttgccaccatggcggtgatggcgccgcgcaccctgctgctgctgctgagcggcgcgctggcgctgacccagacctgggcggaggggtccgtgcgggtggtgaccaccttctccgagttctcctccctcccctcctacgctgcgttcgccacggcgcaggtcgccttcaacgtggtgaacaagctcggagtcttggtcccacacgtcggtgagatcccagtggcctacaggaaggtgctgctgcgggcgcgcgacctcatctgcgcacagaagttcctgaacgtgcctctccacggaacgatcctcacgcgaagcgtgctcaacgacatcttgtcacgcctggctgctctggcattgttgctgctggacaggctcgaggtcacgccttcaggtacctgggcagcactccagatcccattcgcttaccaggacgtcaactgcaccgaggtccccgtggccatacacgctgaccagctcaagcagtacggtgactgcctgggagacatccagtgcgtgcagctgcacaacgacattcttcttgcaaaactcgcttggccactcatcgtgacggccctccacgtgcagctctccctccccgtcctgcaggtgagagacgtgctggtgaggggactggtcgacttccaggtcacgatcgctgagatcctcctcatcatcatgtccctcatcgacctccaggagctcgtggacttctgcggaaagggataccacctcatgagcttcccccagtccgctcctcacggtgtcgtcttcctccacgttacttacgttcccgctcagctcgagggtagtgtggcctacgagtcactggcaaagtacacgcagctctgccagtaccttaacacgctcaccctcgcagtcccatacaacatgagggtcatccatttcggagccctcacctgcttctccacacaatttgcattcgcatgcccggacggcgttaaacatgtgtatcagctccgcgctagatcagtctcccccaaattgttcatcaggcaggaaataacaaactgcgtgaaaatgctgtgcactcactataccgtaagttgcttgccatttacgattaattgccaactggggagtcttgtagtcagatgttcattctatgaggattttttggaataccatgacgttcgggtggtgctgaagctggcactcggggggtccgtcgctatcaagatcactctgaagaagttgaagaagagcctgaacgtagcgaaggactacaaggacgacgacgacaagattgtgggcattattgcgggcctggtgctgctgggcgcggtgattaccggcgcggtggtggcggcggtgatgtggcgccgcaaaagcagcgatcgcaaaggcggcagctatacccaggcggcgagcagcgatagcgcgcagggcagcgatgtgagcctgaccgcgtgcaaagtgtaagcatctagggcggccaattccgcccctctcccccccccccctctccctcccccccccctaacgttactggccgaagccgcttggaataaggccggtgtgcgtttgtctatatgttattttccaccatattgccgtcttttggcaatgtgagggcccggaaacctggccctgtcttcttgacgagcattcctaggggtctttcccctctcgccaaaggaatgcaaggtctgttgaatgtcgtgaaggaagcagttcctctggaagcttcttgaagacaaacaacgtctgtagcgaccctttgcaggcagcggaaccccccacctggcgacaggtgcctctgcggccaaaagccacgtgtataagatacacctgcaaaggcggcacaaccccagtgccacgttgtgagttggatagttgtggaaagagtcaaatggctctcctcaagcgtattcaacaaggggctgaaggatgcccagaaggtaccccattgtatgggatctgatctggggcctcggtgcacatgctttacatgtgtttagtcgaggttaaaaaaacgtctaggccccccgaaccacggggacgtggttttcctttgaaaaacacgatgataagcttgccacaacccgggatcctcggggcttgccaccatggcggtgatggcgccgcgcaccctgctgctgctgctgagcggcgcgctggcgctgacccagacctgggcgagcgtcctcctctcaatgcagggtgcggtggacatcaacaagctctacgagcctttgacccaagaccacgtggacattctgggtccgctgtccgctcagaccggcatcgccgtcctcgacatgtgcgcctccttgaaggagctcaacgacctctgcttcaccaacgtctacgctgacagcttcgtcatccgagaccaggtcatcctgctgaacaagcacatcgacgcctacaagacgttcgaggtcttcgcacaggtcaagcagatctacaagaccgtggtgatcaaggtgtgcgagttccagttctgcaacgaccccttcctcggtgtgtactacgagatcctcgacatcacgccatgcagcttcggtggtgtaagcgtgatcggcgactgcgcgaccgtgcacaccgctagcgacgtgctctaccagccgccccagacctctataacaagtgcctatttgaagcttcgctctgacgttgactacgactgcgtcagcttctgctacatgcaccacatggagggatacgtgatgcacgctaactacggcgaggtgcccgtgagcatcatcaacaacaccttcaaggtcagcatctggaacctcgactacatcatcaacctgatcatcaagaacttgagcaagagcttccaccaggagtgcagcctgcagagctgcacccagcaccagccatacgtggtggacgacccttgccccatccacttctactccaagtggtacatcagagtgggtgccagggagaccatctgcgcccccctcaccgtgttcttcaacttcctggtccaggctggtaacgtgcagctcagggtcatcggacacttgacccagtacaacaggtacctggccctgtacaacaagtacaagtacttcctgcccagggtgttctcagcggtggggaacatctgctacaccccctcaaagttgatcgagtacaccaacttcagagtgcagcccacggagtccatcgtccgcgaggtccccgccaactccacggtcctctccttttgtgccttcgcgttccagaccctcctggcactccataggagctatctcactcccgccgcagcatattatgtggggtatctgcaaccgagaactttccttctcaagccgaggtggtacttttattatctcggcacacgccttacattgggcgtatacgattatctggtgtcaacgcagggggggggggggagcgcgcgcagcgtcgcgtcccagagcatcatcgcgtacacgatgaccgagatcagcttcatgttgtggtgcaaggaccagccttacagggtcgtcgtcctcagcttcgagctcttgcacgcgcccgccaccgtctgcggaggtgaggcagtcaagacccagttcaactactacaagaaggtcgacggcgtcgtgcagcagctcccggagaagcactggccacagatcgcacagttcgcgcctagcgcaagcgccttcttcaccttcagcgtgctggcgtgctacgagcacatcgtctacggagacttcaagttcccactcaagttgcgcggcacctccaccttcaagtgctacggagtcctgcagtacggttccttctgcacccagctctgcaccctcaagtccttcaccgtggagaagggagtcgaggaggtgctgagcgaggcacggcagcacgccttcaagctcaacatcaagctgttgggtgtcgggggcaagccgtgcatcaaggacggatgcgtgcccctcaacatcatccctttgacgacggctgttgagggctgcatggtccaggtgacgtgcggtaccaccaaggggttctgcgacctcaagggcaagtacgtgcagatcccaaccacctgcgcaaacgacatcaacttggtgcgggacttgcctcaggggttctccgctctcgagccactcgtggacctctgtccccgacacgtgatctgtacgagcgaggacaaggcgtgccccttgatcgcggcagtaataacccgcgaggttgggttcgtgacagtgaacgtgctggcttggctctacgctgcagtgtccgagctggtcatcggcgctgtgatcttgcggggacacctccgcatcgctgggcaccacctcgggaggtgcgagctctaccactaccaggagtgcgtgcggggaaccaccgtgctgctcaaggagccgtgctcctccgggacgttgccggtgaacgtcgccttcgagctcatcagtgtgacgactgagattctcccagtcagcatggcatcatgctgcctctactgccgatgccacatcatcagcaactgcgtggcggactacagcgtcctctacaacagcgcgtacccgtacgacgtcccggactacgcgattgtgggcattattgcgggcctggtgctgctgggcgcggtgattaccggcgcggtggtggcggcggtgatgtggcgccgcaaaagcagcgatcgcaaaggcggcagctatacccaggcggcgagcagcgatagcgcgcagggcagcgatgtgagcctgaccgcgtgcaaagtgtaa

SEQ ID NO: 796 - DNA, 9733 bp, Artificial Sequence
  From FIG. 10
gccaccatggcggtgatggcgccgcgcaccctgctgctgctgctgagcggcgcgctggcgctgacccagacctgggcgacctacgcgagcgcgctgtgggagatccagcaggtggtggacgcggacagcaagatcgtgccgcgccgcgcgcgcagcgtgcgctatccgcagctgagcgagttcgacgtggtgcgccagtgcagcggcgtgccgcgccgcgcgcgcagcgtgcgctatccgctgatggtggtgatcccggactacccgcgccgcgcgcgcagcgtgcgctatccgaagatcctgaacaacctgggcgtggacatcgcggccaacaccgtgatctgggacccgcgccgcgcgcgcagcgtgcgctatccgaccaaggtcgacggggtcgacgtcgagctcttcccgcgccgcgcgcgcagcgtgcgctatccggtcttggggtccttggcggcgacggtgccgcgccgcgcgcgcagcgtgcgctatccgtgctcctgcgggtcctgctgcaagccgcgccgcgcgcgcagcgtgcgctatccggtgctgcccttcaacgacggggtctacttcgcgccgcgccgcgcgcgcagcgtgcgctatccgttcttctccaacgtcacctggttccacgcgatccacgtgagcccgcgccgcgcgcgcagcgtgcgctatccgagccaggacctcagcgtggtgtccccgcgccgcgcgcgcagcgtgcgctatccgagcgaggccttcttgatcgggtgcaactacctgccgcgccgcgcgcgcagcgtgcgctatccggccgaggtccagatcgaccggctgccgcgccgcgcgcgcagcgtgcgctatccggggtccaacgtcttccagacgcgggcgggatgcctcccgcgccgcgcgcgcagcgtgcgctatccgatcaaggacctcccgaaggagatcaccgtcgcgaccagcaggacgctctcctactacaagctcggcgcctcccagagggtcgcgccgcgccgcgcgcgcagcgtgcgctatccgaccgacgcggtcgactgcgccttgccgcgccgcgcgcgcagcgtgcgctatccgttcaactgctacttcccgctgcagtcctacgggttcccgcgccgcgcgcgcagcgtgcgctatccgggccccaaggtcaagtacctctacttcataccgcgccgcgcgcgcagcgtgcgctatccgttcgagtacgtcagccagccgttcctgatgccgcgccgcgcgcgcagcgtgcgctatccgctccagtccctccagacctacgtcacgcagcagctgatcagggccgcgccgcgccgcgcgcgcagcgtgcgctatccgacctccgcgtgcgtgctggccgcggagtgcacgatattcaagccgcgccgcgcgcgcagcgtgcgctatccgacgtcctgctgctcctgcctgaagccgcgccgcgcgcgcagcgtgcgctatccgcggctctgcgcctactgctgcaacatcgtcaacgtctccctcgtcaagccgtccttctacgtctactcaagggtcaagaacctcccgcgccgcgcgcgcagcgtgcgctatccgaccccactcatccagccaatcggcgcactcccgcgccgcgcgcgcagcgtgcgctatccggccctcggtaagctccaggacgtggtcaaccagaacccgcgccgcgcgcgcagcgtgcgctatccgttcacgggatgcgtcatcgcctggccgcgccgcgcgcgcagcgtgcgctatccgtacacggagttggagccgccgtgcagattcgtcaccgacccgcgccgcgcgcgcagcgtgcgctatccgctgtcccccgtcgcgctcaggcagatgtcctgcgccgccggcccgcgccgcgcgcgcagcgtgcgctatccgatccagctctcttcttactccctcttcagccgcctggaggaggagctgcgccgccgcctgaccgaggtgggcatcatcgcgggcctggtgctgctgggcgcggtgatcaccggcgcggtggtggcggcggtgatgtggatgcaccgccgccgcagccgcagctgccgcgaggaccagaacccggtgatggacgaccagcgcgacctgatcagcaacaacgaacagctgccgatgctgggccgccgcccgggcgcgccggagagcaaatgcagccgctaagcatctagggcggccaattccgcccctctcccccccccccctctccctcccccccccctaacgttactggccgaagccgcttggaataaggccggtgtgcgtttgtctatatgttattttccaccatattgccgtcttttggcaatgtgagggcccggaaacctggccctgtcttcttgacgagcattcctaggggtctttcccctctcgccaaaggaatgcaaggtctgttgaatgtcgtgaaggaagcagttcctctggaagcttcttgaagacaaacaacgtctgtagcgaccctttgcaggcagcggaaccccccacctggcgacaggtgcctctgcggccaaaagccacgtgtataagatacacctgcaaaggcggcacaaccccagtgccacgttgtgagttggatagttgtggaaagagtcaaatggctctcctcaagcgtattcaacaaggggctgaaggatgcccagaaggtaccccattgtatgggatctgatctggggcctcggtgcacatgctttacatgtgtttagtcgaggttaaaaaaacgtctaggccccccgaaccacggggacgtggttttcctttgaaaaacacgatgataagcttgccacaacccgggatcctcggggcttgccaccatggcggtgatggcgccgcgcaccctgctgctgctgctgagcggcgcgctggcgctgacccagacctgggcggaggggtccgtgcgggtggtgaccaccttcccgcgccgcgcgcgcagcgtgcgctatccgtccgagttctcctccctcccctcctacgctgcgttcgccacggcgcagccgcgccgcgcgcgcagcgtgcgctatccggtcgccttcaacgtggtgaacaagccgcgccgcgcgcgcagcgtgcgctatccgctcggagtcttggtcccacacgtcggtgagatcccagtggcctacaggaaggtgctgctgcgggcgcgcgacctcatctgcgcacagaagttcccgcgccgcgcgcgcagcgtgcgctatccgctgaacgtgcctctccacggaacgatcctcacgcgaccgcgccgcgcgcgcagcgtgcgctatccgagcgtgctcaacgacatcttgtcacgcctgccgcgccgcgcgcgcagcgtgcgctatccggctgctctggcattgttgctgctggacaggctcccgcgccgcgcgcgcagcgtgcgctatccggaggtcacgccttcaggtacctggccgcgccgcgcgcgcagcgtgcgctatccggcagcactccagatcccattcgctccgcgccgcgcgcgcagcgtgcgctatccgtaccaggacgtcaactgcaccgaggtccccgtggccatacacgctgaccagctcccgcgccgcgcgcgcagcgtgcgctatccgaagcagtacggtgactgcctgggagacatcccgcgccgcgcgcgcagcgtgcgctatccgcagtgcgtgcagctgcacaacgacattcttcttgcaaaaccgcgccgcgcgcgcagcgtgcgctatccgctcgcttggccactcatcgtgacggccctcccgcgccgcgcgcgcagcgtgcgctatccgcacgtgcagctctccctccccgtcctgcaggtgagagacgtgctggtgaggggaccgcgccgcgcgcgcagcgtgcgctatccgctggtcgacttccaggtcacgatcgctgagatcctcctcatcatcatgccgcgccgcgcgcgcagcgtgcgctatccgtccctcatcgacctccaggagctcccgcgccgcgcgcgcagcgtgcgctatccggtggacttctgcggaaagggataccacctcatgagcttcccccagtccgctcctcacggtgtcgtcttcctccacgttacttacgttcccgctcagccgcgccgcgcgcgcagcgtgcgctatccgctcgagggtagtgtggcctacgagtcactgccgcgccgcgcgcgcagcgtgcgctatccggcaaagtacacgcagctctgccagtaccttaacacgctcaccctcgcagtcccatacaacatgagggtcatccatttcggaccgcgccgcgcgcgcagcgtgcgctatccggccctcacctgcttctccacacaatttgcattcgcatgcccggacggcgttaaacatgtgtatcagctccgcgctagatcagtctcccccaaattgttcatcaggcaggaaccgcgccgcgcgcgcagcgtgcgctatccgataacaaactgcgtgaaaatgctgtgcactcacccgcgccgcgcgcgcagcgtgcgctatccgtataccgtaagttgcttgccatttacgattaattgccaaccgcgccgcgcgcgcagcgtgcgctatccgctggggagtcttgtagtcagatgttcattctatgaggattttttggaataccatgacgttcgggtggtgctgccgcgccgcgcgcgcagcgtgcgctatccgaagctggcactcggggggtccgtcgctatcaagatcactccgcgccgcgcgcgcagcgtgcgctatccgctgaagaagttgaagaagagcctgaacgtagcgaaggactacaaggacgacgacgacaagatcgtgggcatcatcgcgggcctggtgctgctgggcgcggtgatcaccggcgcggtggtggcggcggtgatgtggatgcaccgccgccgcagccgcagctgccgcgaagaccagaagccggtgatggacgaccagcgcgacctgatcagcaacaacgagcagctgccgatgctgggccgccgcccgggcgcgccggagagcaagtgcagccgctaagcatctagggcggccaattccgcccctctcccccccccccctctccctcccccccccctaacgttactggccgaagccgcttggaataaggccggtgtgcgtttgtctatatgttattttccaccatattgccgtcttttggcaatgtgagggcccggaaacctggccctgtcttcttgacgagcattcctaggggtctttcccctctcgccaaaggaatgcaaggtctgttgaatgtcgtgaaggaagcagttcctctggaagcttcttgaagacaaacaacgtctgtagcgaccctttgcaggcagcggaaccccccacctggcgacaggtgcctctgcggccaaaagccacgtgtataagatacacctgcaaaggcggcacaaccccagtgccacgttgtgagttggatagttgtggaaagagtcaaatggctctcctcaagcgtattcaacaaggggctgaaggatgcccagaaggtaccccattgtatgggatctgatctggggcctcggtgcacatgctttacatgtgtttagtcgaggttaaaaaaacgtctaggccccccgaaccacggggacgtggttttcctttgaaaaacacgatgataagcttgccacaacccgggatcctcggggcttgccaccatggcggtgatggcgccgcgcaccctgctgctgctgctgagcggcgcgctggcgctgacccagacctgggcgagcgtcctcctctcaatgcagggtgcggtggacatcaacaagctcccgcgccgcgcgcgcagcgtgcgctatccgtacgagcctttgacccaagaccacgtggacattctgggtccgctgtccgctcagaccggcatcgccgtcctcgacatgtgcgcctccttgaaggagctcccgcgccgcgcgcgcagcgtgcgctatccgaacgacctctgcttcaccaacgtctacgctgacagcttcgtcatccgaccgcgccgcgcgcgcagcgtgcgctatccggaccaggtcatcctgctgaacaagcacatcgacgcctacaagacgttcccgcgccgcgcgcgcagcgtgcgctatccggaggtcttcgcacaggtcaagcagatctacaagaccccgcgccgcgcgcgcagcgtgcgctatccggtggtgatcaaggtgtgcgagttccagttctgcaacgaccccttcctcggtgtgtactacccgcgccgcgcgcgcagcgtgcgctatccggagatcctcgacatcacgccatgcagcttcggtggtgtaagcgtgccgcgccgcgcgcgcagcgtgcgctatccgatcggcgactgcgcgaccgtgcacaccgctccgcgccgcgcgcgcagcgtgcgctatccgagcgacgtgctctaccagccgccccagacctctataacaagtgccccgcgccgcgcgcgcagcgtgcgctatccgtatttgaagcttcgctctgacgttccgcgccgcgcgcgcagcgtgcgctatccggactacgactgcgtcagcttctgctacatgcaccacatggagccgcgccgcgcgcgcagcgtgcgctatccgggatacgtgatgcacgctaactacccgcgccgcgcgcgcagcgtgcgctatccgggcgaggtgcccgtgagcatcatcaacaacccgcgccgcgcgcgcagcgtgcgctatccgaccttcaaggtcagcatctggaacctcgactacatcatcaacctgatcatcaagaacttgagcaagagcccgcgccgcgcgcgcagcgtgcgctatccgttccaccaggagtgcagcctgcagagctgcacccagcaccagccatacgtggtggacgacccttgccccatccacttctactccaagtggtacatcagagtgggtgccaggccgcgccgcgcgcgcagcgtgcgctatccggagaccatctgcgcccccctcaccgtgttcttcccgcgccgcgcgcgcagcgtgcgctatccgaacttcctggtccaggctggtaacgtgcagctcagggtcatcggacacccgcgccgcgcgcgcagcgtgcgctatccgttgacccagtacaacaggtacctggccctgtacaacaagtacaagtacttcccgcgccgcgcgcgcagcgtgcgctatccgctgcccagggtgttctcagcggtggggaacatctgctacaccccctcaaagttgatcgagtacaccccgcgccgcgcgcgcagcgtgcgctatccgaacttcagagtgcagcccacggagtccatcgtccgcccgcgccgcgcgcgcagcgtgcgctatccggaggtccccgccaactccacggtcctctccttttgtgccttcgcgccgcgccgcgcgcgcagcgtgcgctatccgttccagaccctcctggcactccataggagctatctcactcccccgcgccgcgcgcgcagcgtgcgctatccggccgcagcatattatgtggggtatctgcaaccgagaactttccttctcaagccgaggtggtacttttattatctcggcacacgccttacattgggcgtatacgattatctggtgtcaacgcagggggggggggggagcgcgcgcagcgtcgcgtcccagagcatcatcgcgtacacgatgccgcgccgcgcgcgcagcgtgcgctatccgaccgagatcagcttcatgttgtggtgcaaggacccgcgccgcgcgcgcagcgtgcgctatccgcagccttacagggtcgtcgtcctcagcttcgagctcttgcacgcgcccgccaccgtctgcggaccgcgccgcgcgcgcagcgtgcgctatccgggtgaggcagtcaagacccagttcaactactacaagaaggtcgacggcgtcgtgcagcagctcccggagccgcgccgcgcgcgcagcgtgcgctatccgaagcactggccacagatcgcacagttcgcgcctagcgcaagcgccttcttcccgcgccgcgcgcgcagcgtgcgctatccgaccttcagcgtgctggcgtgctacccgcgccgcgcgcgcagcgtgcgctatccggagcacatcgtctacggagacttcccgcgccgcgcgcgcagcgtgcgctatccgaagttcccactcaagttgcgcggcaccccgcgccgcgcgcgcagcgtgcgctatccgtccaccttcaagtgctacggagtcccgcgccgcgcgcgcagcgtgcgctatccgctgcagtacggttccttctgcacccagctcccgcgccgcgcgcgcagcgtgcgctatccgtgcaccctcaagtccttcaccgtggagaagggaccgcgccgcgcgcgcagcgtgcgctatccggtcgaggaggtgctgagcgaggcacggcagcacccgcgccgcgcgcgcagcgtgcgctatccggccttcaagctcaacatcaagctgttgggtgtcgggggcaagccgtgcatcaagccgcgccgcgcgcgcagcgtgcgctatccggacggatgcgtgcccctcaacatcatccctttgacgacggctccgcgccgcgcgcgcagcgtgcgctatccggttgagggctgcatggtccaggtgacgtgcggtaccaccccgcgccgcgcgcgcagcgtgcgctatccgaaggggttctgcgacctcaagggcaagtacgtgcagatcccaaccacctgcgcaaacgacccgcgccgcgcgcgcagcgtgcgctatccgatcaacttggtgcgggacttgcctcaggggttctccgctctcgagccactcgtggacctcccgcgccgcgcgcgcagcgtgcgctatccgtgtccccgacacgtgatctgtacgagcgagccgcgccgcgcgcgcagcgtgcgctatccggacaaggcgtgccccttgatcgcggcagtaataacccgcgaggttgggttcgtgccgcgccgcgcgcgcagcgtgcgctatccgacagtgaacgtgctggcttggctctacgctgcagtgccgcgccgcgcgcgcagcgtgcgctatccgtccgagctggtcatcggcgctgtgatcttgcggggacacctccgcatcgctgggcaccacctcgggaggtgcccgcgccgcgcgcgcagcgtgcgctatccggagctctaccactaccaggagtgcgtgcggggaaccaccgtgctgctcaaggagccgtgctcctccgggccgcgccgcgcgcgcagcgtgcgctatccgacgttgccggtgaacgtcgccttcgagctcccgcgccgcgcgcgcagcgtgcgctatccgatcagtgtgacgactgagattctcccagtcagcatgccgcgccgcgcgcgcagcgtgcgctatccggcatcatgctgcctctactgccgatgccacatcccgcgccgcgcgcgcagcgtgcgctatccgatcagcaactgcgtggcggactacagcgtcctctacaacagcgcgtacccgtacgacgtcccggactacgcgatcgtgggcatcatcgcgggcctggtgctgctgggcgcggtgatcaccggcgcggtggtggcggcggtgatgtggatgcaccgccgccgcagccgcagctgccgcgaggaccagaacccggtgatggacgaccagcgcgacctgatcagcaacaacgaacagctgccgatgctgggccgccgcccgggcgcgccggagagcaaatgcagccgctaa

SEQ ID NO: 797 - DNA, 6793 bp, Artificial Sequence
  From FIG. 12
gccaccatggcggtgatggcgccgcgcaccctgctgctgctgctgagcggcgcgctggcgctgacccagacctgggcgacctacgcgagcgcgctgtgggagatccagcaggtggtggacgcggacagcaagatcgtgcagctgagcgagttcgacgtggtgcgccagtgcagcggcgtgctgatggtggtgatcccggactacaagatcctgaacaacctgggcgtggacatcgcggccaacaccgtgatctgggacaccaaggtcgacggggtcgacgtcgagctcttcgtcttggggtccttggcggcgacggtgtgctcctgcgggtcctgctgcaaggtgctgcccttcaacgacggggtctacttcgcgttcttctccaacgtcacctggttccacgcgatccacgtgagcagccaggacctcagcgtggtgtccagcgaggccttcttgatcgggtgcaactacctggccgaggtccagatcgaccggctggggtccaacgtcttccagacgcgggcgggatgcctcatcaaggacctcccgaaggagatcaccgtcgcgaccagcaggacgctctcctactacaagctcggcgcctcccagagggtcgcgaccgacgcggtcgactgcgccttgttcaactgctacttcccgctgcagtcctacgggttcggccccaaggtcaagtacctctacttcatattcgagtacgtcagccagccgttcctgatgctccagtccctccagacctacgtcacgcagcagctgatcagggccgcgacctccgcgtgcgtgctggccgcggagtgcacgatattcaagacgtcctgctgctcctgcctgaagcggctctgcgcctactgctgcaacatcgtcaacgtctccctcgtcaagccgtccttctacgtctactcaagggtcaagaacctcaccccactcatccagccaatcggcgcactcgccctcggtaagctccaggacgtggtcaaccagaacttcacgggatgcgtcatcgcctggtacacggagttggagccgccgtgcagattcgtcaccgacctgtcccccgtcgcgctcaggcagatgtcctgcgccgccggcatccagctctcttcttactccctcttcagccgcctggaggaggagctgcgccgccgcctgaccgaggtgggcatcatcgcgggcctggtgctgctgggcgcggtgatcaccggcgcggtggtggcggcggtgatgtggatgcaccgccgccgcagccgcagctgccgcgaggaccagaacccggtgatggacgaccagcgcgacctgatcagcaacaacgaacagctgccgatgctgggccgccgcccgggcgcgccggagagcaaatgcagccgctaagcatctagggcggccaattccgcccctctcccccccccccctctccctcccccccccctaacgttactggccgaagccgcttggaataaggccggtgtgcgtttgtctatatgttattttccaccatattgccgtcttttggcaatgtgagggcccggaaacctggccctgtcttcttgacgagcattcctaggggtctttcccctctcgccaaaggaatgcaaggtctgttgaatgtcgtgaaggaagcagttcctctggaagcttcttgaagacaaacaacgtctgtagcgaccctttgcaggcagcggaaccccccacctggcgacaggtgcctctgcggccaaaagccacgtgtataagatacacctgcaaaggcggcacaaccccagtgccacgttgtgagttggatagttgtggaaagagtcaaatggctctcctcaagcgtattcaacaaggggctgaaggatgcccagaaggtaccccattgtatgggatctgatctggggcctcggtgcacatgctttacatgtgtttagtcgaggttaaaaaaacgtctaggccccccgaaccacggggacgtggttttcctttgaaaaacacgatgataagcttgccacaacccgggatcctcggggcttgccaccatggcggtgatggcgccgcgcaccctgctgctgctgctgagcggcgcgctggcgctgacccagacctgggcggaggggtccgtgcgggtggtgaccaccttctccgagttctcctccctcccctcctacgctgcgttcgccacggcgcaggtcgccttcaacgtggtgaacaagctcggagtcttggtcccacacgtcggtgagatcccagtggcctacaggaaggtgctgctgcgggcgcgcgacctcatctgcgcacagaagttcctgaacgtgcctctccacggaacgatcctcacgcgaagcgtgctcaacgacatcttgtcacgcctggctgctctggcattgttgctgctggacaggctcgaggtcacgccttcaggtacctgggcagcactccagatcccattcgcttaccaggacgtcaactgcaccgaggtccccgtggccatacacgctgaccagctcaagcagtacggtgactgcctgggagacatccagtgcgtgcagctgcacaacgacattcttcttgcaaaactcgcttggccactcatcgtgacggccctccacgtgcagctctccctccccgtcctgcaggtgagagacgtgctggtgaggggactggtcgacttccaggtcacgatcgctgagatcctcctcatcatcatgtccctcatcgacctccaggagctcgtggacttctgcggaaagggataccacctcatgagcttcccccagtccgctcctcacggtgtcgtcttcctccacgttacttacgttcccgctcagctcgagggtagtgtggcctacgagtcactggcaaagtacacgcagctctgccagtaccttaacacgctcaccctcgcagtcccatacaacatgagggtcatccatttcggagccctcacctgcttctccacacaatttgcattcgcatgcccggacggcgttaaacatgtgtatcagctccgcgctagatcagtctcccccaaattgttcatcaggcaggaaataacaaactgcgtgaaaatgctgtgcactcactataccgtaagttgcttgccatttacgattaattgccaactggggagtcttgtagtcagatgttcattctatgaggattttttggaataccatgacgttcgggtggtgctgaagctggcactcggggggtccgtcgctatcaagatcactctgaagaagttgaagaagagcctgaacgtagcgaaggactacaaggacgacgacgacaagatcgtgggcatcatcgcgggcctggtgctgctgggcgcggtgatcaccggcgcggtggtggcggcggtgatgtggatgcaccgccgccgcagccgcagctgccgcgaagaccagaagccggtgatggacgaccagcgcgacctgatcagcaacaacgagcagctgccgatgctgggccgccgcccgggcgcgccggagagcaagtgcagccgctaagcatctagggcggccaattccgcccctctcccccccccccctctccctcccccccccctaacgttactggccgaagccgcttggaataaggccggtgtgcgtttgtctatatgttattttccaccatattgccgtcttttggcaatgtgagggcccggaaacctggccctgtcttcttgacgagcattcctaggggtctttcccctctcgccaaaggaatgcaaggtctgttgaatgtcgtgaaggaagcagttcctctggaagcttcttgaagacaaacaacgtctgtagcgaccctttgcaggcagcggaaccccccacctggcgacaggtgcctctgcggccaaaagccacgtgtataagatacacctgcaaaggcggcacaaccccagtgccacgttgtgagttggatagttgtggaaagagtcaaatggctctcctcaagcgtattcaacaaggggctgaaggatgcccagaaggtaccccattgtatgggatctgatctggggcctcggtgcacatgctttacatgtgtttagtcgaggttaaaaaaacgtctaggccccccgaaccacggggacgtggttttcctttgaaaaacacgatgataagcttgccacaacccgggatcctcggggcttgccaccatggcggtgatggcgccgcgcaccctgctgctgctgctgagcggcgcgctggcgctgacccagacctgggcgagcgtcctcctctcaatgcagggtgcggtggacatcaacaagctctacgagcctttgacccaagaccacgtggacattctgggtccgctgtccgctcagaccggcatcgccgtcctcgacatgtgcgcctccttgaaggagctcaacgacctctgcttcaccaacgtctacgctgacagcttcgtcatccgagaccaggtcatcctgctgaacaagcacatcgacgcctacaagacgttcgaggtcttcgcacaggtcaagcagatctacaagaccgtggtgatcaaggtgtgcgagttccagttctgcaacgaccccttcctcggtgtgtactacgagatcctcgacatcacgccatgcagcttcggtggtgtaagcgtgatcggcgactgcgcgaccgtgcacaccgctagcgacgtgctctaccagccgccccagacctctataacaagtgcctatttgaagcttcgctctgacgttgactacgactgcgtcagcttctgctacatgcaccacatggagggatacgtgatgcacgctaactacggcgaggtgcccgtgagcatcatcaacaacaccttcaaggtcagcatctggaacctcgactacatcatcaacctgatcatcaagaacttgagcaagagcttccaccaggagtgcagcctgcagagctgcacccagcaccagccatacgtggtggacgacccttgccccatccacttctactccaagtggtacatcagagtgggtgccagggagaccatctgcgcccccctcaccgtgttcttcaacttcctggtccaggctggtaacgtgcagctcagggtcatcggacacttgacccagtacaacaggtacctggccctgtacaacaagtacaagtacttcctgcccagggtgttctcagcggtggggaacatctgctacaccccctcaaagttgatcgagtacaccaacttcagagtgcagcccacggagtccatcgtccgcgaggtccccgccaactccacggtcctctccttttgtgccttcgcgttccagaccctcctggcactccataggagctatctcactcccgccgcagcatattatgtggggtatctgcaaccgagaactttccttctcaagccgaggtggtacttttattatctcggcacacgccttacattgggcgtatacgattatctggtgtcaacgcagggggggggggggagcgcgcgcagcgtcgcgtcccagagcatcatcgcgtacacgatgaccgagatcagcttcatgttgtggtgcaaggaccagccttacagggtcgtcgtcctcagcttcgagctcttgcacgcgcccgccaccgtctgcggaggtgaggcagtcaagacccagttcaactactacaagaaggtcgacggcgtcgtgcagcagctcccggagaagcactggccacagatcgcacagttcgcgcctagcgcaagcgccttcttcaccttcagcgtgctggcgtgctacgagcacatcgtctacggagacttcaagttcccactcaagttgcgcggcacctccaccttcaagtgctacggagtcctgcagtacggttccttctgcacccagctctgcaccctcaagtccttcaccgtggagaagggagtcgaggaggtgctgagcgaggcacggcagcacgccttcaagctcaacatcaagctgttgggtgtcgggggcaagccgtgcatcaaggacggatgcgtgcccctcaacatcatccctttgacgacggctgttgagggctgcatggtccaggtgacgtgcggtaccaccaaggggttctgcgacctcaagggcaagtacgtgcagatcccaaccacctgcgcaaacgacatcaacttggtgcgggacttgcctcaggggttctccgctctcgagccactcgtggacctctgtccccgacacgtgatctgtacgagcgaggacaaggcgtgccccttgatcgcggcagtaataacccgcgaggttgggttcgtgacagtgaacgtgctggcttggctctacgctgcagtgtccgagctggtcatcggcgctgtgatcttgcggggacacctccgcatcgctgggcaccacctcgggaggtgcgagctctaccactaccaggagtgcgtgcggggaaccaccgtgctgctcaaggagccgtgctcctccgggacgttgccggtgaacgtcgccttcgagctcatcagtgtgacgactgagattctcccagtcagcatggcatcatgctgcctctactgccgatgccacatcatcagcaactgcgtggcggactacagcgtcctctacaacagcgcgtacccgtacgacgtcccggactacgcgatcgtgggcatcatcgcgggcctggtgctgctgggcgcggtgatcaccggcgcggtggtggcggcggtgatgtggatgcaccgccgccgcagccgcagctgccgcgaggaccagaacccggtgatggacgaccagcgcgacctgatcagcaacaacgaacagctgccgatgctgggccgccgcccgggcgcgccggagagcaaatgcagccgctaa

SEQ ID NO: 798 - protein, 623 aa, Artificial Sequence
  Concatemer 1 from FIG.13
MTYASALWEIQQVVDADSKIVPRRARSVRYPQLSEFDVVRQCSGVPRRARSVRYPLMVVIPDYPRRARSVRYPKILNNLGVDIAANTVIWDPRRARSVRYPTKVDGVDVELFPRRARSVRYPVLGSLAATVPRRARSVRYPCSCGSCCKPRRARSVRYPVLPFNDGVYFAPRRARSVRYPFFSNVTWFHAIHVSPRRARSVRYPSQDLSVVSPRRARSVRYPSEAFLIGCNYLPRRARSVRYPAEVQIDRLPRRARSVRYPGSNVFQTRAGCLPRRARSVRYPIKDLPKEITVATSRTLSYYKLGASQRVAPRRARSVRYPTDAVDCALPRRARSVRYPFNCYFPLQSYGFPRRARSVRYPGPKVKYLYFIPRRARSVRYPFEYVSQPFLMPRRARSVRYPLQSLQTYVTQQLIRAAPRRARSVRYPTSACVLAAECTIFKPRRARSVRYPTSCCSCLKPRRARSVRYPRLCAYCCNIVNVSLVKPSFYVYSRVKNLPRRARSVRYPTPLIQPIGALPRRARSVRYPALGKLQDVVNQNPRRARSVRYPFTGCVIAWPRRARSVRYPYTELEPPCRFVTDPRRARSVRYPLSPVALRQMSCAAGPRRARSVRYPIQLSSYSLF

SEQ ID NO: 799 - protein, 626 aa, Artificial Sequence
  Concatemer 2 from FIG. 13
EGSVRVVTTFPRRARSVRYPSEFSSLPSYAAFATAQPRRARSVRYPVAFNVVNKPRRARSVRYPLGVLVPHVGEIPVAYRKVLLRARDLICAQKFPRRARSVRYPLNVPLHGTILTRPRRARSVRYPSVLNDILSRLPRRARSVRYPAALALLLLDRLPRRARSVRYPEVTPSGTWPRRARSVRYPAALQIPFAPRRARSVRYPYQDVNCTEVPVAIHADQLPRRARSVRYPKQYGDCLGDIPRRARSVRYPQCVQLHNDILLAKPRRARSVRYPLAWPLIVTALPRRARSVRYPHVQLSLPVLQVRDVLVRGPRRARSVRYPLVDFQVTIAEILLIIMPRRARSVRYPSLIDLQELPRRARSVRYPVDFCGKGYHLMSFPQSAPHGVVFLHVTYVPAQPRRARSVRYPLEGSVAYESLPRRARSVRYPAKYTQLCQYLNTLTLAVPYNMRVIHFGPRRARSVRYPALTCFSTQFAFACPDGVKHVYQLRARSVSPKLFIRQEPRRARSVRYPITNCVKMLCTHPRRARSVRYPYTVSCLPFTINCQPRRARSVRYPLGSLVVRCSFYEDFLEYHDVRVVLPRRARSVRYPKLALGGSVAIKITPRRARSVRYPLKKLKKSLNVAK

SEQ ID NO: 800 - protein, 620 aa, Artificial Sequence
  Concatermer 3 from FIG 13
SVLLSMQGAVDINKLPRRARSVRYPYEPLTQDHVDILGPLSAQTGIAVLDMCASLKELPRRARSVRYPNDLCFTNVYADSFVIRPRRARSVRYPDQVILLNKHIDAYKTFPRRARSVRYPEVFAQVKQIYKTPRRARSVRYPVVIKVCEFQFCNDPFLGVYYPRRARSVRYPEILDITPCSFGGVSVPRRARSVRYPIGDCATVHTAPRRARSVRYPSDVLYQPPQTSITSAPRRARSVRYPYLKLRSDVPRRARSVRYPDYDCVSFCYMHHMEPRRARSVRYPGYVMHANYPRRARSVRYPGEVPVSIINNPRRARSVRYPTFKVSIWNLDYIINLIIKNLSKSPRRARSVRYPFHQECSLQSCTQHQPYVVDDPCPIHFYSKWYIRVGARPRRARSVRYPETICAPLTVFFPRRARSVRYPNFLVQAGNVQLRVIGHPRRARSVRYPLTQYNRYLALYNKYKYFPRRARSVRYPLPRVFSAVGNICYTPSKLIEYTPRRARSVRYPNFRVQPTESIVRPRRARSVRYPEVPANSTVLSFCAFAPRRARSVRYPFQTLLALHRSYLTPPRRARSVRYPAAAYYVGYLQPRTFLLKPRWYFYYLGTRLTLGVYDYLVSTQ

SEQ ID NO: 801 - protein, 621 aa, Artificial Sequence
  Concatemer 4 from FIG 13
ARSVASQSIIAYTMPRRARSVRYPTEISFMLWCKDPRRARSVRYPQPYRVVVLSFELLHAPATVCGPRRARSVRYPGEAVKTQFNYYKKVDGVVQQLPEPRRARSVRYPKHWPQIAQFAPSASAFFPRRARSVRYPTFSVLACYPRRARSVRYPEHIVYGDFPRRARSVRYPKFPLKLRGTPRRARSVRYPSTFKCYGVPRRARSVRYPLQYGSFCTQLPRRARSVRYPCTLKSFTVEKGPRRARSVRYPVEEVLSEARQHPRRARSVRYPAFKLNIKLLGVGGKPCIKPRRARSVRYPDGCVPLNIIPLTTAPRRARSVRYPVEGCMVQVTCGTTPRRARSVRYPKGFCDLKGKYVQIPTTCANDPRRARSVRYPINLVRDLPQGFSALEPLVDLPRRARSVRYPCPRHVICTSEPRRARSVRYPDKACPLIAAVITREVGFVPRRARSVRYPTVNVLAWLYAAVPRRARSVRYPSELVIGAVILRGHLRIAGHHLGRCPRRARSVRYPELYHYQECVRGTTVLLKEPCSSGPRRARSVRYPTLPVNVAFELPRRARSVRYPISVTTEILPVSMPRRARSVRYPASCCLYCRCHIPRRARSVRYPISNCVADYSVLYNSA

SEQ ID NO: 802 - protein, 1330 aa, Artificial Sequence
  Concatemer 1 from FIG 14
GPKVKYLYFIKATLQATQLYLGGMSYYCKPHKPPISFPLATLQAPINLVRDLPQGFSVLEPLVDLPIGATLQANYTVSCLPFTINCQEPATLQAVNCTEVPVAIHADQLATLQATDTVVEHVTFFIYNATLQARLCAYCCNIVNVSLVKPSFYATLQAVEHVTFFIYNKIVDEATLQAVLGSLAATVATLQAKACVEEVTTTATLQAPEHSLAEYATLQAIVKFISTCACEIVATLQALEILDITPCSFGGVSVITPATLQAVREVLSDRELHLSWEVATLQAKNPLLYDANYFLCWHTNCYDYCIPYATLQAAFASEAARVVRSIATLQAVQLRVIGHATLQATTVAAFHQECSLQLCTQHQPYVVDATLQAYPSLETIQITISATLQAFCLEASFNYLATLQAQLALFKGVHFVCNLLLLFATLQAAPGCDVTDVTQLYLATLQAISVTTEILPVSMATLQAPNFVFPLNSIIKTIQPRATLQAQCVQLHNDILLAKATLQAIRRPFLCCKCCYDHVISTSHATLQADANYFLCWHTNCYHYCIPYNATLQAAPLIELCVATLQATDVVYRAFATLQAFSVAALTNNVAFQTVATLQAKLTCATTRQVVNVVTTKIALATLQARVDFCGKGYHLMSFPQSAPHGVVATLQAKAVFISPYATLQAYDKLVSSFATLQAITTVAAFHQECSLQATLQARSVYPVASPATLQAALLAVFHSASKIITLATLQATFSVLACYATLQACANFNVLFSTVFPFTSFGATLQAYDFAVSKGATLQAISEHDYQIGGATLQAIRNLQHRLYECLYRATLQALAWPLIVTALATLQALTQYNRYLALYNKYKYFATLQACYDYCIPYNSVTSLIVITSATLQADSYFVVKRATLQAINFVRIIMRLWLCCKCRATLQAINAACRKVQHMVVKAATLQAEVPANSTVLSFCAFAATLQARAKHYVYIGDPAQLPAPRTLATLQAYAKPFLNKVVSTTATLQAEGVVDYGARFYFYTATLQANVVIKVCEFQFCNYPFLGVYYHATLQAANSVFNICQAVTANVNALLATLQAAGFSLWVYKATLQAISNCVADYATLQAGSNVFQTRAGCLIGAEATLQAFTGCVIAWATLQALRIAGHHLGRCATLQAYVYLPYPDPSRILGAGCFVDATLQAPINLVRGLPQGFSVLEPLVDATLQAIPIRASLPFGWLIVGATLQAETKCTLKSFTVEKGATLQAKQYGDCLGNIATLQAAAAYYVGYLATLQATQNVLYENQKATLQAQEHYVRITGLATLQAMTSCCSCLKGCCSCGSCCKFATLQASLRCGACIRRPFLCCK

SEQ ID NO: 803 - protein, 1338 aa, Artificial Sequence
  Concatemer 2 from FIG 14
LECNVKTTEVVGDIILKATLQAHFPRKGVFVSNATLQAWFTALTQHATLQAFTSDYYQLYSTQLSTYTGVEHVTFFIYNATLQALQKAAITILDGISQYSLRLIATLQAISEHDYQIATLQAKNTVCTVCGMATLQAKLSYGIAIVREVLSDRELHLSATLQAGYLPQNAVVKIYCPACHNSEATLQAVFSQCVNLTATLQADKACPLIAAVITREVGFVATLQAVPVVDSYYSLLMATLQASSIVITSVATLQALPINVIVFATLQAMADLVYALATLQAKLGASQRVATLQAPFTINCQEPKATLQAKGVQIPCTCGKATLQASSPDAVTAYNGYATLQAYLGGMSYYCKSHKLPISFPLCANATLQAAEVQIDRLATLQAHFAIGLALYYPSARIVYTACSHAAVDALCEKALKYLPIDKCSRIIPARARVATLQALFVVEVVDKYFDCYDGGCATLQAATVAYFNMVYMPASWVATLQAQIELKFNPPALQDAYATLQATQALLQRQATLQALPFTINCQELATLQAYDANYFLCWHATLQAVVADAVIKTLATLQAHPNCVNCSDDRCILHCANFNVATLQARKIFVDGVPFVVSTGYATLQAFRSSVLHSTQDLATLQAGKIQDSLFSTASALGKLQDVVNQATLQAYDLSVVNARATLQASDRVVFVLWAHGFEATLQAFAFACPDGVKHVYQLRARSVSPKLFIRQEATLQAVKDCVVLHSYFTSDYYQLYATLQATRAKVGILCIMSATLQAMMFVKHKHAFLCLFLLPSFATVAYFNMVYMPAATLQASDDAVVCFATLQAYLKLRSDVATLQAKSASVYYSQLATLQAAQSFLNRVCGVSAARLTATLQAFNSVCRLMATLQAKHWPQIAQFAPSASATLQAGVNLVAVPTGYVDATLQAGYQPYRVVVLSFELLHAPATVCATLQAQLSLSKGFHFVCNLLLLFVATLQAINFVRIIMRLWLCLKCRATLQAKLMVVIPDYATLQAIEELFYSYATHATLQAAALALLLLDRLATLQADYDCVSFCYMHHMEATLQAAWLYAAVIATLQANFRVQPTESIVRFATLQAYALVYFLQSINFVIIIMRLWLCWATLQAALGKLQDVVNQNATLQAIQLSSYSLFATLQANYQCGHYKHIATLQAETICAPLTVFFATLQARNLQHRLYECLYRNATLQAFNSVCRFMATLQASSVLHSTQDFATLQAMMFVKHKHAFLATLQALKLKDCVMYATLQAEFQFCNYPFLGVYHKATLQATRAKVGILCITSATLQATDAVDCALATLQAIKVCEFQFCNDPYYATLQALLYDANYFLCWHINCYDYCIPY

SEQ ID NO: 804 - protein, 1338 aa, Artificial Sequence
  Concatemer 3 from FIG 14
ANPVLPFNDGVYFAATLQAVTMPLGYVTHGLATLQAFNCYFPLQSYGFATLQAARSVARQSIIAYTMSATLQAAKYTQLCQYLNTLTLAVPYNMRVIHFGATLQAAGAALQIPFAATLQALLNVPLHGTILTRATLQAVVNPVMEPATLQASQHTMLVKQFDDYVYLPYPDPSATLQAFQTLLHRSYLTPATLQAIEVQGYKSVNITATLQAYCPRHVICTSEATLQAEPLLKGVKLATLQAYDFVVSKGATLQAYDKLQFISLEIATLQAREGVFVSNATLQAYELKHGTFTCAATLQAFLVLLPLVSSQCVNLTATLQALMNVLTLVYKVYYGATLQAKASCTLSEQLDFIATLQAYTELEPPCRFVTDATLQADNVLSTFISAAATLQAFSASTSAFVETVKGLDYKAFKQIVESCATLQADVLYQPPQATLQADKYVRNLQHRLYECLYATLQATLQCIMLVYCFLGYFCTCYFGLFCLLNRYATLQATLPVNVAFELATLQAALLAVFHNASATLQATDTCVEHVTFFIYNATLQAAPLIELCVDATLQARQALLKTVQFCATLQADMYSVMLTATLQAFKELLVYAADPAMHAATLQAFQTLLALHRSYLTATLQATYGVGYQPYRVVVLSATLQAGVHFVCNLLLLFVIVYSATLQAFCKLHNWNCVNCDTFCAGSTATLQALMNVLTLFYKVYYGNAATLQAHQPYVVDDPCPIHFYSKWYIRVGATLQASAPLIELCLDEATLQAQLALSKGVYFVCNLLLLFVTVYSATLQAIMASLVLARKHTTCCSLSHRFYRLANECAQVLATLQAKLNVGDYFVLTSHTVMPLSATLQAYADVFHLYLQYIRKLHDATLQACYTPSKLIEYTATLQAGVVQQLPETATLQASEAVEAPLVGTPVCINGLMLATLQASRIIPARARVDCFDKFATLQAEVFAQVKQIYKTATLQAISSVLNDILSRLDATLQAFSNVTWFHAIVSATLQAPSFLGRYMATLQAFGTVYEKLKPVLDWATLQAIETISLAGATLQADYYQLYSTQATLQANEFYAYLRKHATLQAGEVPVSIINNTATLQAISNCVADYSVLYNSAATLQAVTTVIFLARGIVFMCVEYATLQAPINLVRGLPQGFSALEPLVDATLQAAALQIPFAATLQARFQLHRSYLTPATLQAVTGLFKDCSKATLQAFEHIVYGDFATLQAALLAVFQSASKIITLATLQAKCAYWVPRASATLQAVDTSLSSLKLKDCVMATLQAANSVFNICQSVTANVNALLATLQAYDPLQPELATLQADPIHSLRVCVATLQACLNRVCTNATLQAFFSNVTWFH

SEQ ID NO: 805 - protein, 1349 aa, Artificial Sequence
  Concatemer 4 from FIG 14
TEISFMLWCKDGATLQALNDLCFTNVYADSFVIRGATLQAGTNLPLQLGFATLQAQWNLVIGFLFLTWICLLQFAYATLQAVMFLARGIVFMCVDYCPIFFIATLQAETQALPQRATLQASPGVVNPVMEATLQAITNCVKMLCTHATLQAHYQECVRGTTVLLKEPCSSGATLQAKNPLLYDANYFLCCHTNCYDYCIATLQAAKLLHKPIVWHVATLQASMWALIISVTSNYATLQAARDLSLQFATLQAFLYIIKLIFLWLLWPVTLACFVLAAVYRIATLQAASQGLLASIATLQAFFSNVTWFHVSATLQATENLLLYIDATLQASVFQSASKIITLATLQAGNCDVVIGIVATLQAHPNCVNCLDDRCILHCANFNVATLQAACIDCSARHIATLQATISVTTEILPVSMAKATLQATSACVLAAECTIFKATLQASINVANYQATLQAEGSVRVVTTFATLQAVLVQSTQWSLFFFFYENAFLPFAMGATLQAYEPLTQDHVDILGPLSAQTGIAVLDMCASLKELATLQASRELKVTFFATLQAYNLLKDCPAVAKHDFFKFATLQATLGVLVPHVGEIPVAYRKVLLRATLQAYIWLGFIAGLIAIVMVTIMLCCMTSCCSCLKATLQALVDFQVTIAEILLIIMATLQATFKVSIWNLDYIATLQAGVGGKPCIKVATLQASDIDITFLKKDAPYIVGDVVQEGVLATLQALGSLVVRCSFYEDFLEYHDVRVVLATLQAANFCALILAYCNKATLQAYRLANECAQVLSEMVMCGGSLYVKPGATLQAQIGVVREFATLQASYFAIGLALYYPSARATLQASFKLKDCVMYATLQAPRWYFYYLGTATLQAVAAGLEAPFLYLYALVYFLQSINFVRIIMRLWLCWKCATLQASVLLSMQGAVDIATLQAETTVDIVVFDEATLQATYASALWEIQQVVDADSKIVQLSEATLQAVLYQGVNCTEVATLQATTVMFLARGIVFMCVEYCPIFFIATLQAGVYCCREHATLQAEIYQAGSKATLQALIAIVMVTIMLCCITSCCSCLKGATLQAARDLICAQKFATLQANPVLPFNDGVYFAATLQAVPQEHYVRITGLYPTLNATLQAVLVQSTQWSLFFFLYENAFLPFAMGATLQAHEFCSQHTMLVKATLQAQVAVLYQDVNCTEVPVAIHATLQADDRCILHCANFNVLFSTVFPATLQAFEYVSQPFLMATLQAGFNCYFPLQPYGFQATLQAIKVCEFQFCNDPFLGVYHATLQANHDLYCQVHGNAHVASCDAIMTRATLQASHGKQVVSDIDYVPLKSATCITRATLQAAVLYQGVNCTEVPFAIHADQL

SEQ ID NO: 806 - protein, 1349 aa, Artificial Sequence; identical to SEQ ID NO: 805
  Concatermer 5 from 806

SEQ ID NO: 807 - protein, 1335 aa, Artificial Sequence
  Concatemer 6 from FIG 14
GKPVPYCYDTNATLQAEVTPSGTWLTYTGAIKLATLQAINLVRDLPQGFSALEPLVDLPIATLQAYDNLQFISLEIATLQASDFVRATATIPIQASLPFGWLIATLQAPVLKGVKLATLQANVAFNVVNKGATLQACSNLLLQYGSFCTQLNRATLQASPDVDLADIATLQASYELQTPFEIKLAKKATLQANIGCNHTGVVGEATLQAVRTNVYLAVFDKATLQAANSIVCRFDTRVLSNLATLQAATNVVIKVCEFQFATLQAQLALSKGVHFVCNLLLLFVTVYATLQAHWPQIAQFAPSASAFFATLQARVEAFEYYATLQAILLNKHIDAYKTFPPIEATLQAKFPLKLRGTATLQANCYDYCIPYNATLQAGASCCLYCRCHIDHATLQAVQQESPFVMMATLQACLPFTINCQKPATLQAKEITVATSRTLSYYKLGASQRVAATLQAVVNAANVYLKHATLQAAIKCVPQADVEWKATLQALFFFLYENAFLPFVMGIATLQAYDKLQFTSLEIATLQASSNVANYQATLQAAAGLEAPFLYLYVLVYFLQSINFVRATLQARTCCLCDRRATCFSTATLQAERFVSLAIDAYPLTKATLQAVLSEARQHATLQASVASQSIIAYTMSLATLQAKGFCDLKGKYVQIPTTCAATLQAGVITHDVSSAATLQAIAMACLVGLMWLSYFIASFRLFATLQATPLIQPIGALATLQAIHFYSKWYIRVGAKATLQALPRVFSAVGNATLQASQHTMLVKQGDDYVYLPYATLQAYRLANECAQVLSEIVMCGGSLYVKPGATLQACANFNVLFSTVFPPTSFGATLQADTSLKLKECVMYATLQAFRELGVVHNQDVNLHSATLQAMPVCVETKAATLQASEFSSLPSYAAFATAQATLQAEEIIYNLLKDCPAVAKATLQAVKGLQPSVGPKQAATLQATVLKKCKSAFYILPSIATLQADGCVPLNIIPLTTAATLQAFLYENAFLPFAMGVIAMSATLQATQALPHRQATLQADKSAFVNLKQLPFFYYSDSATLQALQSLQTYVTQQLIRAAATLQAFPQSAPHGVVFLHVTYVPAQATLQAISDYDYYRYNATLQASLIDLQELATLQASELVIGAVILRATLQAVKDCVLLHSYFTSDYYQLYATLQATEIYQAGSTATLQAHYVRITGLYPTLNILATLQAFFSNVTWFHAIHVSATLQAGSCGSVGFATLQAKHWPQIAQFATLQAAYYVGYLQPRTFLLKATLQAYGIIWVATEATLQAEHVQIHTIATLQAEFQFCNDPFLGVYYHATLQALVLLPLVSSQCVNFATLQAKQYGDCLGDI

SEQ ID NO: 808 - protein, 448 aa, Artificial Sequence
  Concatemer 1 from FIG 15
NIGCNHTGVVGEATLQACSNLLLQYGSFCTQLNRATLQAGVNLVAVPTGYVDATLQAISVTTEILPVSMATLQAINAACRKVQHMVVKAATLQAARDLICAQKFATLQAKACVEEVTTTATLQARKIFVDGVPFVVSTGYATLQAFRELGVVHNQDVNLHSATLQASELVIGAVILRATLQAVRTNVYLAVFDKATLQAKLNVGDYFVLTSHTVMPLSATLQAKASCTLSEQLDFIATLQAIETISLAGATLQASYLFQHANLDSCKRATLQAFGTVYEKLKPVLDWATLQALQSLQTYVTQQLIRAAATLQASSPDAVTAYNGYATLQAVTMPLGYVTHGLATLQATENLLLYIDATLQAVPVVDSYYSLLMATLQAPEHSLAEYATLQANYQCGHYKHIATLQADKSAFVNLKQLPFFYYSDSATLQALFVVEVVDKYFDCYDGGC

SEQ ID NO: 809 - protein, 448 aa, Artificial Sequence; identical to SEQ ID NO: 808
  Concatemer 2 from FIG 15

SEQ ID NO: 810 - protein, 450 aa, Artificial Sequence
  Concatemer 3 from FIG 15
ETFVTHSKGLATLQAAQSFLNRVCGVSAARLTATLQAGSNVFQTRAGCLIGAEATLQAAGFSLWVYKATLQAYDLSVVNARATLQAFSVAALTNNVAFQTVATLQAPSFLGRYMATLQASEAVEAPLVGTPVCINGLMLATLQAIVKFISTCACEIVATLQAERFVSLAIDAYPLTKATLQANEFYAYLRKHATLQAAKLLHKPIVWHVATLQATIATYCTGSIPCSVCLSGLDSLDATLQAYADVFHLYLQYIRKLHDATLQAVMCGGSLYVKATLQAQIELKFNPPALQDAYATLQAYVYLPYPDPSRILGAGCFVDATLQARVDFCGKGYHLMSFPQSAPHGVVATLQADPIHSLRVCVATLQAALGKLQDVVNQNATLQASLIDLQELATLQAFFSNVTWFHATLQAGCDVTDVTQLYLGGMSYYCKSHKPPISFPLCANGQVFGL

SEQ ID NO: 811 - protein, 438 aa, Artificial Sequence
  Concatemer 4 from FIG 15
ACIDCSARHIATLQANHDLYCQVHGNAHVASCDAIMTRATLQAVNCTEVPVAIHADQLATLQAHFAIGLALYYPSARIVYTACSHAAVDALCEKALKYLPIDKCSRIIPARARVATLQAFKELLVYAADPAMHAATLQARVEAFEYYATLQATGLHPTQAPTHLSVDTATLQALLNVPLHGTILTRATLQAVTGLFKDCSKATLQATDAVDCALATLQADNVLSTFISAAATLQAFCLEASFNYLATLQAKCAYWVPRASATLQAVREVLSDRELHLSWEVATLQAKLTCATTRQVVNVVTTKIALATLQAYELKHGTFTCAATLQAVVNAANVYLKHATLQALEILDITPCSFGGVSVITPATLQAIRRPFLCCKCCYDHVISTSHATLQAWNVVRIKIVQMLSATLQANPVLPFNDGVYFAATLQAKSASVYYSQL

SEQ ID NO: 812 - protein, 455 aa, Artificial Sequence
  Concatemer 5 from FIG 15
RSVYPVASPATLQALKEILVTYNCCDDDATLQAFNCYFPLQSYGFATLQAAEVQIDRLATLQAEQYVFCTVNALATLQAGTNLPLQLGFATLQAKLGASQRVATLQACLNRVCTNATLQAYDKLVSSFATLQAFKLASHMYATLQAIMASLVLARKHTTCCSLSHRFYRLANECAQVLATLQAVTANVNALLATLQALRIAGHHLGRCATLQAARDLSLQFATLQAKAVFISPYATLQAQIGVVREFATLQAYAKPFLNKVVSTTATLQADSYFVVKRATLQANFRVQPTESIVRFATLQAQEHYVRITGLATLQAVQQESPFVMMATLQAGVITHDVSSAATLQAVVADAVIKTLATLQATRAKVGILCIMSATLQAMTSCCSCLKGCCSCGSCCKFATLQAGNCDVVIGIVATLQAYPSLETIQITISATLQARAKHYVYIGDPAQLPAPRTL

SEQ ID NO: 813 - protein, 444 aa, Artificial Sequence
  Concatemer 6 from FIG 15
LNDLCFTNVYADSFVIRGATLQARNLQHRLYECLYRNATLQAAAAYYVGYLATLQAGYQPYRVVVLSFELLHAPATVCATLQASRELKVTFFATLQALPINVIVFATLQAFSASTSAFVETVKGLDYKAFKQIVESCATLQANNLVVMAYATLQAGVYCCREHATLQATYACWHHSIGFDYVYATLQAFCKLHNWNCVNCDTFCAGSTATLQADVVAIDYKHYATLQAPNFVFPLNSIIKTIQPRATLQAIEELFYSYATHATLQATQNVLYENQKATLQAANSIVCRFDTRVLSNLATLQARHSLSHFVNLATLQASDIDITFLKKDAPYIVGDVVQEGVLATLQAKESVQTFFKLVATLQALQKAAITILDGISQYSLRLIATLQALECNVKTTEVVGDIILKATLQAATNVVIKVCEFQFATLQATVLKKCKSAFYILPSI

SEQ ID NO: 814 - protein, 628 aa, Artificial Sequence
  Concatemer 1 from FIG 16
NIGCNHTGVVGEATLQAISNCVADYSVLYNSAATLQAMADLVYALATLQAREGVFVSNATLQAHFAIGLALYYPSARIVYTACSHAAVDALCEKALKYLPIDKCSRIIPARARVATLQAYADVFHLYLQYIRKLHDATLQAIVKFISTCACEIVATLQARVEAFEYYATLQAGVYCCREHATLQARAKHYVYIGDPAQLPAPRTLATLQAEIYQAGSKATLQAYPSLETIQITISATLQAKSASVYYSQLATLQAVNCTEVPVAIHADQLATLQATGLHPTQAPTHLSVDTATLQAISSVLNDILSRLDATLQALECNVKTTEVVGDIILKATLQAFKELLVYAADPAMHAATLQADNVLSTFISAAATLQAVTANVNALLATLQAINAACRKVQHMVVKAATLQAALGKLQDVVNQNATLQASSPDAVTAYNGYATLQAGYLPQNAVVKIYCPACHNSEATLQARHSLSHFVNLATLQAFSNVTWFHAIVSATLQALQSLQTYVTQQLIRAAATLQASHGKQVVSDIDYVPLKSATCITRATLQALVLLPLVSSQCVNFATLQATQNVLYENQKATLQAVLYQGVNCTEVATLQAIMASLVLARKHTTCCSLSHRFYRLANECAQVL

SEQ ID NO: 815 - protein, 638 aa, Artificial Sequence
  Concatemer 2 from FIG 16
AFASEAARVVRSIATLQASDRVVFVLWAHGFEATLQASVLNDILARLATLQATSGVGYQPYRVVVLATLQAPINLVRGLPQGFSALEPLVDATLQARSVASQSIIAYTMATLQAKGVQIPCTCGKATLQAKACVEEVTTTATLQAKCAYWVPRASATLQAVTMPLGYVTHGLATLQANEFYAYLRKHATLQAEFQFCNDPFLGVYYHATLQATIATYCTGSIPCSVCLSGLDSLDATLQACSNLLLQYGSFCTQLNRATLQANYQCGHYKHIATLQAANSIVCRFDTRVLSNLATLQASRELKVTFFATLQAYELKHGTFTCAATLQAVFSQCVNLTATLQAGYQPYRVVVLSFELLHAPATVCATLQAFPQSAPHGVVFLHVTYVPAQATLQAFRSSVLHSTRDLATLQAEGVVDYGARFYFYTATLQAGNCDVVIGIVATLQAAALQIPFAATLQAFLVLLPLVSIQCVNLTATLQACLNRVCTNATLQAEFQFCNYPFLGVYHKATLQATYGVGYQPYRVVVLSATLQAETKCTLKSFTVEKGATLQAAIKCVPQADVEWKATLQAIRRPFLCCKCCYDHVISTSHATLQAPINLVRGLPQGFSVLEPLVDATLQAKLNVGDYFVLTSHTVMPLS

SEQ ID NO: 816 - protein, 630 aa, Artificial Sequence
  Concatemer 3 from FIG 16
ETFVTHSKGLATLQANHDLYCQVHGNAHVASCDAIMTRATLQATEIYQAGSTATLQAAGFSLWVYKATLQAFQTLLALHRSYLTATLQATKDVVECLKLSHQSATLQAYDKLVSSFATLQALPINVIVFATLQASELVIGAVILRATLQAKASCTLSEQLDFIATLQAFSVAALTNNVAFQTVATLQAEPLLKGVKLATLQAGCDVTDVTQLYLGGMSYYCKSHKPPISFPLCANGQVFGLATLQAFCLEASFNYLATLQALRIAGHHLGRCATLQATRAKVGILCIMSATLQAIETISLAGATLQAFNCYFPLQSYGFATLQAARSVARQSIIAYTMSATLQASVELKHFFFAATLQANFRVQPTESIVRFATLQAVRTNVYLAVFDKATLQAATNVVIKVCEFQFATLQAPVLKGVKLATLQALEILDITPCSFGGVSVITPATLQATVLKKCKSAFYILPSIATLQAFQTLLHRSYLTPATLQAFFSNVTWFHAIHVSATLQAHFPRKGVFVSNATLQAHEFCSQHTMLVKATLQAAEVQIDRLATLQAVREVLSDRELHLSWEVATLQAFSNVTWFHAIHVSGTNATLQAARDLSLQFATLQASTFKCYGVATLQASSVLHSTQDF

SEQ ID NO: 817 - protein, 630 aa, Artificial Sequence; identical to SEQ ID NO: 816
  Concatemer 4 from FIG 16

SEQ ID NO: 818 - protein, 638 aa, Artificial Sequence
  Concatemer 5 from FIG 16
RSVYPVASPATLQALKEILVTYNCCDDDATLQAAYYVGYLQPRTFLLKATLQAYIWLGFIAGLIAIVMVTIMLCCMTSCCSCLKATLQAERFVSLAIDAYPLTKATLQAPSFLGRYMATLQADDRCILHCANFNVLFSTVFPATLQANNLVVMAYATLQAFRELGVVHNQDVNLHSATLQAFEYVSQPFLMATLQANVVIKVCEFQFCNYPFLGVYYHATLQAKAVFISPYATLQALNDLCFTNVYADSFVIRGATLQADPIHSLRVCVATLQALIAIVMVTIMLCCITSCCSCLKGATLQASEAVEAPLVGTPVCINGLMLATLQARTCCLCDRRATCFSTATLQARVDFCGKGYHLMSFPQSAPHGVVATLQAGSNVFQTRAGCLIGAEATLQAQIGVVREFATLQAGTNLPLQLGFATLQASYELQTPFEIKLAKKATLQAFFSNVTWFHVSATLQATYACWHHSIGFDYVYATLQAFCKLHNWNCVNCDTFCAGSTATLQAQIELKFNPPALQDAYATLQAFKLASHMYATLQASDIDITFLKKDAPYIVGDVVQEGVLATLQAPINLVRDLPQGFSVLEPLVDLPIGATLQAKQYGDCLGDIATLQALLNVPLHGTILTRATLQASLIDLQEL

SEQ ID NO: 819 - protein, 639 aa, Artificial Sequence
  Concatemer 6 from FIG 16
INLVRDLPQGFSALEPLVDLPIATLQARNLQHRLYECLYRNATLQAFLVLLPLVSSQCVNLTATLQAEQYVFCTVNALATLQAEVFAQVKQIYKTATLQADVVAIDYKHYATLQAKLGASQRVATLQATENLLLYIDATLQAKESVQTFFKLVATLQARKIFVDGVPFVVSTGYATLQAIKDLPKEITVATSRTLSYATLQASPDVDLADIATLQAKQYGDCLGNIATLQASVASQSIIAYTMSLATLQAMTSCCSCLKGCCSCGSCCKFATLQASAAYYVGYLQLRTFLLKATLQAYDPLQPELATLQAGKIQDSLFSTASALGKLQDVVNQATLQAIEELFYSYATHATLQADKSAFVNLKQLPFFYYSDSATLQASVDCTMYIATLQANPVLPFNDGVYFAATLQAAAAYYVGYLATLQAFSASTSAFVETVKGLDYKAFKQIVESCATLQARFQLHRSYLTPATLQAANFCALILAYCNKATLQAWNVVRIKIVQMLSATLQASYLFQHANLDSCKRATLQAGFNCYFPLQPYGFQATLQADSYFVVKRATLQAFFSNVTWFHATLQAVMCGGSLYVKATLQAVTGLFKDCSKATLQAAVLYQGVNCTEVPFAIHADQLATLQAVVNAANVYLKH

SEQ ID NO: 820 - protein, 791 aa, Artificial Sequence
  Concatemer 1 from FIG 17
IRRPFLCCKCCYDHVISTSHATLQASDRVVFVLWAHGFEATLQAANSVFNICQSVTANVNALLATLQASYFAIGLALYYPSARATLQAVVADAVIKTLATLQASSPDAVTAYNGYATLQAYELKHGTFTCAATLQAEQYVFCTVNALATLQASEAVEAPLVGTPVCINGLMLATLQAFNSVCRLMATLQASLRCGACIRRPFLCCKATLQAKLSYGIAIVREVLSDRELHLSATLQAANFCALILAYCNKATLQANIGCNHTGVVGEATLQAYDFVVSKGATLQARHSLSHFVNLATLQAHFAIGLALYYPSARIVYTACSHAAVDALCEKALKYLPIDKCSRIIPARARVATLQACLNRVCTNATLQAFSASTSAFVETVKGLDYKAFKQIVESCATLQAFEYVSQPFLMATLQAFRSSVLHSTQDLATLQAAFASEAARVVRSIATLQAPINLVRGLPQGFSALEPLVDATLQAQVAVLYQDVNCTEVPVAIHATLQATISVTTEILPVSMAKATLQAYDNLQFISLEIATLQAKLNVGDYFVLTSHTVMPLSATLQASSNVANYQATLQATYGVGYQPYRVVVLSATLQATDAVDCALATLQAGKIQDSLFSTASALGKLQDVVNQATLQASPDVDLADIATLQAKLGASQRVATLQAAALQIPFAATLQAHFPRKGVFVSNATLQAFRSSVLHSTRDLATLQAYADVFHLYLQYIRKLHDATLQAKSASVYYSQLATLQAANSIVCRFDTRVLSNLATLQADNVLSTFISAAATLQAARDLICAQKF

SEQ ID NO: 821 - protein, 791 aa, Artificial Sequence; identical to SEQ ID NO: 820
  Concatemer 2 from FIG 17

SEQ ID NO: 822 - protein, 803 aa, Artificial Sequence
  Concatemer 3 from FIG 17
RTNVYLAVFDKATLQANHDLYCQVHGNAHVASCDAIMTRATLQAISDYDYYRYNATLQAYRLANECAQVLSEMVMCGGSLYVKPGATLQASDDAVVCFATLQAFNSVCRFMATLQAVVNAANVYLKHATLQATRAKVGILCIMSATLQAVQQESPFVMMATLQAYLGGMSYYCKSHKLPISFPLCANATLQAVPVVDSYYSLLMATLQAVMCGGSLYVKATLQAINLVRDLPQGFSALEPLVDLPIATLQATVLKKCKSAFYILPSIATLQAQEHYVRITGLATLQADSYFVVKRATLQAVTMPLGYVTHGLATLQAGCDVTDVTQLYLGGMSYYCKSHKPPISFPLCANGQVFGLATLQAEVFAQVKQIYKTATLQAANSVFNICQAVTANVNALLATLQAKQYGDCLGNIATLQAHPNCVNCLDDRCILHCANFNVATLQAFSNVTWFHAIVSATLQAKESVQTFFKLVATLQAAGAALQIPFAATLQACSNLLLQYGSFCTQLNRATLQALNDLCFTNVYADSFVIRGATLQANFRVQPTESIVRFATLQARLNVGDYFVLTSHTATLQASDIDITFLKKDAPYIVGDVVQEGVLATLQADKYVRNLQHRLYECLYATLQAGFNCYFPLQPYGFQATLQASAAYYVGYLQLRTFLLKATLQAALCEKALKYFPIDKCSRIIPAATLQAIKVCEFQFCNDPYYATLQAGYLPQNAVVKIYCPACHNSEATLQAAEVQIDRLATLQAYDKLQFTSLEIATLQALEILDITPCSFGGVSVITPATLQATYACWHHSIGFDYVY

SEQ ID NO: 823 - protein, 793 aa, Artificial Sequence
  Concatemer 4 from FIG 17
YDKLQFISLEIATLQALPINVIVFATLQASQHTMLVKQGDDYVYLPYATLQAIRNLQHRLYECLYRATLQARQALLKTVQFCATLQAYDKLVSSFATLQAAKLLHKPIVWHVATLQASYLFQHANLDSCKRATLQAYDLSVVNARATLQAARDLSLQFATLQAIKDLPKEITVATSRTLSYATLQAFKELLVYAADPAMHAATLQAKASCTLSEQLDFIATLQADMYSVMLTATLQAYNLLKGCPAVAKHDFATLQAVREVLSDRELHLSWEVATLQASTFKCYGVATLQAANPVLPFNDGVYFAATLQAFRELGVVHNQDVNLHSATLQASHGKQVVSDIDYVPLKSATCITRATLQAYAKPFLNKVVSTTATLQADKSAFVNLKQLPFFYYSDSATLQAPNFVFPLNSIIKTIQPRATLQAREGVFVSNATLQAGTNLPLQLGFATLQAGYQPYRVVVLSFELLHAPATVCATLQALIAIVMVTIMLCCITSCCSCLKGATLQATRAKVGILCITSATLQAPSFLGRYMATLQAYDPLQPELATLQAFLVLLPLVSSQCVNLTATLQAEPLLKGVKLATLQATQNVLYENQKATLQAETKCTLKSFTVEKGATLQAFLVLLPLVSIQCVNLTATLQAFQTLLHRSYLTPATLQAMTSCCSCLKGCCSCGSCCKFATLQANEFYAYLRKHATLQAKCAYWVPRASATLQAISVTTEILPVSMATLQAVTGLFKDCSKATLQASVASQSIIAYTMSLATLQARTCCLCDRRATCFSTATLQAFFSNVTWFHVS

SEQ ID NO: 824 - protein, 794 aa, Artificial Sequence
  Concatemer 5 FIG 17
LGGMSYYCKSHKPSISFPLCANATLQADPIHSLRVCVATLQAYDFAVSKGATLQAFKLASHMYATLQADQDVLFAYATLQAASQGLVASIATLQAKLTCATTRQVVNVVTTKIALATLQASRELKVTFFATLQADVVAIDYKHYATLQAACIDCSARHIATLQAKACVEEVTTTATLQARNLQHRLYECLYRNATLQASVELKHFFFAATLQAAQSFLNRVCGVSAARLTATLQAQIELKFNPPALQDAYATLQAHYVRITGLYPTLNILATLQAIVKFISTCACEIVATLQADDRCILHCANFNVLFSTVFPATLQALQKAAITILDGISQYSLRLIATLQAYIWLGFIAGLIAIVMVTIMLCCMTSCCSCLKATLQAAIPINFTISVTTEILPVSMATLQAFFSNVTWFHATLQARIIPARARVECFDKFATLQARFQLHRSYLTPATLQAPINLVRDLPQGFSVLEPLVDLPIGATLQAFSNVTWFHAIHVSGTNATLQATDVVYRAFATLQANPVLPFNDGVYFAATLQAAIKCVPQADVEWKATLQAATNVVIKVCEFQFATLQARVDFCGKGYHLMSFPQSAPHGVVATLQAEFQFCNYPFLGVYHKATLQAAVLYQGVNCTEVPFAIHADQLATLQAHEFCSQHTMLVKATLQAEEIIYNLLKDCPAVAKATLQAALGKLQDVVNQNATLQATQLYLGGMSYYCKPHKPPISFPLATLQAVLYQGVNCTEVATLQAFCLEASFNYLATLQAPVLKGVKLATLQAFTGCVIAWATLQAKQYGDCLGDI

SEQ ID NO: 825 - protein, 805 aa, Artificial Sequence
  Concatemer 6 from FIG 17
YNLLKDCPAVAKHDFFKFATLQAHPNCVNCSDDRCILHCANFNVATLQAASQGLLASIATLQAVPQEHYVRITGLYPTLNATLQAETFVTHSKGLATLQALECNVKTTEVVGDIILKATLQATKDVVECLKLSHQSATLQAGVITHDVSSAATLQAMPVCVETKAATLQATCFSVAALTNNVAFATLQASRIIPARARVDCFDKFATLQARSVYPVASPATLQACANFNVLFSTVFPFTSFGATLQALKEILVTYNCCDDDATLQASQHTMLVKQFDDYVYLPYPDPSATLQAMADLVYALATLQAVTANVNALLATLQARAKHYVYIGDPAQLPAPRTLATLQAWNVVRIKIVQMLSATLQAFPQSAPHGVVFLHVTYVPAQATLQAISNCVADYSVLYNSAATLQATGLHPTQAPTHLSVDTATLQAFFSNVTWFHAIHVSATLQAISSVLNDILSRLDATLQAEFQFCNDPFLGVYYHATLQAFSVAALTNNVAFQTVATLQALLNVPLHGTILTRATLQAECAQVLSETVMCGGSLYVKATLQAGSNVFQTRAGCLIGAEATLQASSVLHSTQDFATLQAYRLANECAQVLSEIVMCGGSLYVKPGATLQANVVIKVCEFQFCNYPFLGVYYHATLQAYPSLETIQITISATLQATSGVGYQPYRVVVLATLQAVNCTEVPVAIHADQLATLQAISNCVADYATLQAIEVQGYKSVNITATLQAFGTVYEKLKPVLDWATLQAAYYVGYLQPRTFLLKATLQAPINLVRGLPQGFSVLEPLVDATLQAFQTLLALHRSYLT

SEQ ID NO: 826 - protein, 652 aa, Artificial Sequence
  Concatemer 1 from FIG 18
TQALLQRQATLQAAYYVGYLQPRTFLLKATLQAFRSSVLHSTQDLATLQAPVLKGVKLATLQASMWALIISVTSNYATLQAQLSLSKGFHFVCNLLLLFVATLQAISEHDYHIGATLQAPFTINCQEPKATLQAWFTALTQHATLQAYGIIWVATEATLQATTVAAFHQECSLQSCTQHQPYVVDDPCPIHFYSKWYIRVGARATLQARLTLGVYDYLVSTQATLQAVCNLLLLFVTVYSHLATLQAISEHDYQIATLQAYFTSDYYQLYSTQLIATLQAAAAYYVGYLATLQAGLKLKDCVMYATLQAVFSQCVNLTATLQAAVLYQGVNCTEVPFAIHADQLATLQAGKIQDSLFSTASALGKLQDVVNQATLQAIKVCEFQFCNDPFLGVYHATLQAKLGASQRVATLQAFTGCVIAWATLQAFRSSVLHSTRDLATLQAEVTPSGTWLTYTGAIKLATLQAVLYQGVNCTEVATLQASSVLHSTQDFATLQAILLNKHIDAYKTFPPIEATLQASPGVFNPVMEPATLQAISNCVADYATLQAIAMACLVGLMWLSYFIASFRLFATLQAIPIRASLPFGWLIVGATLQAFQTLLHRSYLTPATLQAELVIGAVILRGHLRIAGHHLGATLQATISVTTEILPVSMAK

SEQ ID NO: 827 - protein, 641 aa, Artificial Sequence
  Concatemer 2 from FIG 18
VAAGLEAPFLYLYALVYFLQSINFVRIIMRLWLCWKCATLQALRIAGHHLGRCATLQAFFSNVTWFHAIHVSATLQASPDVDLADIATLQAFPQSAPHGVVFLHVTYVPAQATLQACLPFTINCQKPATLQASMWALIISVTSNYSGVVTIVMFLARGIVFATLQAYIWLGFIAGLIAIVMVTIMLCCMTSCCSCLKATLQAMMFVKHKHAFLCLFLLPSFATVAYFNMVYMPAATLQAQLALSKGFHFVCNLLLATLQAALGKLQDVVNQNATLQANPVLPFNDGVYFAATLQAAALALLLLDRLATLQASSIVITSVATLQAESVVKDCVVLHSYFATLQASVFQSASKIITLATLQACYDYCIPYNSVTSLIVITSATLQAMMFVKHKHAFLATLQAYDPLQPELATLQAQLALSKGVHFVCNLLLLFVTVYATLQAETKCTLKSFTVEKGATLQAAALQIPFAATLQAFLVLLPLVSIQCVNLTATLQAITTVAAFHQECSLQATLQAARSVARQSIIAYTMSATLQAKNPLLYDANYFLCCHTNCYDYCIATLQAAIPINFTISVTTEILPVSMATLQAHFPRKGVFVSNATLQASAAYYVGYLQLRTFLLKATLQAQVAVLYQDVNCTEVPVAIH

SEQ ID NO: 828 - protein, 641 aa, Artificial Sequence
  Concatemer 3 from FIG 18
YDANYFLCWHATLQASAPLIELCLDEATLQATTVAAFHQECSLQLCTQHQPYVVDATLQASVASQSIIAYTMSLATLQAEPLLKGVKLATLQANYTVSCSPFTINCQEPATLQAPRWYFYYLGTATLQASSIVITSGATLQAETQALPQRATLQALGSLVVRCSFYEDFLEYHDVRVVLATLQAFQTLLALHRSYLTATLQAEIYQAGSKATLQAGVGGKPCIKVATLQALLYDANYFLCWHINCYDYCIPYATLQAGSNVFQTRAGCLIGAEATLQAATNVVIKVCEFQFATLQANFRVQPTESIVRFATLQAISEHDYQIGGATLQASDFVRATATIPIQASLPFGWLIATLQAAEVQIDRLATLQAGVHFVCNLLLLFVIVYSATLQAVMFLARGIVFMCVDYCPIFFIATLQAEVFAQVKQIATLQAANPVLPFNDGVYFAATLQAAFKLNIKLLGVGGKPCATLQAGFNCYFPLQPYGFQATLQAQWNLVIGFLFLTWICLLQFAYATLQAVTTVIFLARGIVFMCVEYATLQALFFFLYENAFLPFVMGIATLQAFSNVTWFHAIVSATLQAFTSDYYQLYSTQLSTYTGVEHVTFFIYNATLQASFKLKDCVMYATLQAEFQFCNDPFLGVYYH

SEQ ID NO: 829 - protein, 659 aa, Artificial Sequence
  Concatemer 4 from FIG 18
QLALSKGVYFVCNLLLLFVTVYSATLQAREGVFVSNATLQARFQLHRSYLTPATLQAISSVLNDILSRLDATLQAVDTSLSSLKLKDCVMATLQATEIYQAGSTATLQAAAGLEAPFLYLYVLVYFLQSINFVRATLQAKHWPQIAQFATLQAAPLIELCVATLQAINLVRDLPQGFSALEPLVDLPIATLQASTFKCYGVATLQAKQYGDCLGNIATLQACSNLLLQYGSFCTQLNRATLQADANYFLCWHTNCYHYCIPYNATLQAKEITVATSRTLSYYKLGASQRVAATLQALPFTINCQELATLQAAPLIELCVDATLQADYYQLYSTQATLQAVKDCVLLHSYFTSDYYQLYATLQAARDLICAQKFATLQASDFVRATAATLQASVLNDILARLATLQAFLYENAFLPFAMGVIAMSATLQALLNVPLHGTILTRATLQASDFVRATATIPIRASLPFGWLIATLQAFLYIIKLIFLWLLWPVTLACFVLAAVYRIATLQAFSNVTWFHAIHVSGTNATLQATLQCIMLVYCFLGYFCTCYFGLFCLLNRYATLQAVAAGLEAPFFYLYALVYFLQSINATLQATDAVDCALATLQAEFQFCNYPFLGVYHKATLQASPGVVNPVMEATLQAMTSCCSCLKGCCSCGSCCKF

SEQ ID NO: 830 - protein, 635 aa, Artificial Sequence
  Concatemer 5 from FIG 30
KNPLLYDANYFLCWHTNCYDYCIPYATLQASELVIGAVILRATLQALVLLPLVSSQCVNFATLQALKLKDCVMYATLQAPINLVRGLPQGFSALEPLVDATLQAVVNPVMEPATLQAEHVQIHTIATLQAALLAVFHNASATLQAVKDCVVLHSYFTSDYYQLYATLQAALLAVFHSASKIITLATLQATTVMFLARGIVFMCVEYCPIFFIATLQALIAIVMVTIMLCCITSCCSCLKGATLQAVNCTEVPVAIHADQLATLQAINFVRIIMRLWLCLKCRATLQAKHWPQIAQFAPSASATLQAIKVCEFQFCNDPYYATLQAALLAVFQSASKIITLATLQALMNVLTLVYKVYYGATLQAFFSNVTWFHATLQASLIDLQELATLQAGNCDVVIGIVATLQATYGVGYQPYRVVVLSATLQALMNVLTLFYKVYYGNAATLQAFLVLLPLVSSQCVNLTATLQAPINLVRGLPQGFSVLEPLVDATLQAVEHVTFFIYNKIVDEATLQALNDLCFTNVYADSFVIRGATLQATDTVVEHVTFFIYNATLQANYTVSCLPFTINCQEPATLQAKQYGDCLGDIATLQAAGAALQIPFAATLQAFEYVSQPFLMATLQATDTCVEHVTFFIYN

SEQ ID NO: 831 - protein, 647 aa, Artificial Sequence
  Concatemer 6 from FIG 18
EVFAQVKQIYKTATLQAIKDLPKEITVATSRTLSYATLQAISNCVADYSVLYNSAATLQARSVASQSIIAYTMATLQATSGVGYQPYRVVVLATLQANCYDYCIPYNATLQAKDQVILLNKHIDAYKTFATLQAHQPYVVDDPCPIHFYSKWYIRVGATLQAQLALFKGVHFVCNLLLLFATLQADTSLKLKECVMYATLQARVDFCGKGYHLMSFPQSAPHGVVATLQALEILDITPCSFGGVSVITPATLQAYALVYFLQSINFVIIIMRLWLCWATLQAHWPQIAQFAPSASAFFATLQALQSLQTYVTQQLIRAAATLQATQALPHRQATLQAEVTPSGTWATLQAFNCYFPLQSYGFATLQAATVAYFNMVYMPASWVATLQASVDCTMYIATLQAGFNCYSPLQSYGFQATLQANVVIKVCEFQFCNYPFLGVYYHATLQAVLVQSTQWSLFFFFYENAFLPFAMGATLQAGYQPYRVVVLSFELLHAPATVCATLQAVLVQSTQWSLFFFLYENAFLPFAMGATLQAFFSNVTWFHVSATLQAIHFYSKWYIRVGAKATLQATQNVLYENQKATLQAINFVRIIMRLWLCCKCRATLQAPINLVRDLPQGFSVLEPLVDLPIGATLQAISVTTEILPVSM

SEQ ID NO: 832 - protein, 2526 aa, Artificial Sequence
  Concatemer 1 from FIG 19
YVRITGLYPTLNISYEPRRARSVRYPTQLYLGGMSYYCKPHKPPISFPLPRRARSVRYPHFPRKGVFVSNPRRARSVRYPGTNLPLQLGFPRRARSVRYPFTSDYYQLYSTQLSTYTGVEHVTFFIYNPRRARSVRYPNYTVSCLPFTINCQEPPRRARSVRYPLQKAAITILDGISQYSLRLIPRRARSVRYPSVELKHFFFAPRRARSVRYPTDTVVEHVTFFIYNPRRARSVRYPNVAFNVVNKGPRRARSVRYPCSNLLLQYGSFCTQLNRPRRARSVRYPSQHTMLVKQFDDYVYLPYPDPSPRRARSVRYPGYLPQNAVVKIYCPACHNSEPRRARSVRYPFQTLLHRSYLTPPRRARSVRYPGCDVTDVTQLYLGGMSYYCKSHKPPISFPLCANGQVFGLPRRARSVRYPIVKFISTCACEIVPRRARSVRYPEPLLKGVKLPRRARSVRYPARDLSLQFPRRARSVRYPRHSLSHFVNLPRRARSVRYPVREVLSDRELHLSWEVPRRARSVRYPREGVFVSNPRRARSVRYPYELKHGTFTCAPRRARSVRYPHWPQIAQFAPSASAFFPRRARSVRYPKGVQIPCTCGKPRRARSVRYPTENLLLYIDPRRARSVRYPILLNKHIDAYKTFPPIEPRRARSVRYPAIPINFTISVTTEILPVSMPRRARSVRYPKFPLKLRGTPRRARSVRYPSVLNDILARLPRRARSVRYPDNVLSTFISAAPRRARSVRYPACIDCSARHIPRRARSVRYPVQQESPFVMMPRRARSVRYPTISVTTEILPVSMAKPRRARSVRYPTSACVLAAECTIFKPRRARSVRYPLFVVEVVDKYFDCYDGGCPRRARSVRYPGFNCYSPLQSYGFQPRRARSVRYPATVAYFNMVYMPASWVPRRARSVRYPAIKCVPQADVEWKPRRARSVRYPLFFFLYENAFLPFVMGIPRRARSVRYPALLAVFHNASPRRARSVRYPYDKLQFTSLEIPRRARSVRYPSSNVANYQPRRARSVRYPSRELKVTFFPRRARSVRYPTTVAAFHQECSLQSCTQHQPYVVDDPCPIHFYSKWYIRVGARPRRARSVRYPDMYSVMLTPRRARSVRYPRKIFVDGVPFVVSTGYPRRARSVRYPYIWLGFIAGLIAIVMVTIMLCCMTSCCSCLKPRRARSVRYPTYGVGYQPYRVVVLSPRRARSVRYPKDQVILLNKHIDAYKTFPRRARSVRYPKAVFISPYPRRARSVRYPKLALGGSVAIKITPRRARSVRYPYDKLVSSFPRRARSVRYPITTVAAFHQECSLQPRRARSVRYPLMNVLTLFYKVYYGNAPRRARSVRYPHQPYVVDDPCPIHFYSKWYIRVGPRRARSVRYPLGSLVVRCSFYEDFLEYHDVRVVLPRRARSVRYPLPRVFSAVGNPRRARSVRYPQLALSKGVYFVCNLLLLFVTVYSPRRARSVRYPYDFAVSKGPRRARSVRYPYRLANECAQVLSEIVMCGGSLYVKPGPRRARSVRYPQIGVVREFPRRARSVRYPYLKLRSDVPRRARSVRYPKLNVGDYFVLTSHTVMPLSPRRARSVRYPSFKLKDCVMYPRRARSVRYPPRWYFYYLGTPRRARSVRYPCYDYCIPYNSVTSLIVITSPRRARSVRYPMPVCVETKAPRRARSVRYPGVVQQLPETPRRARSVRYPGVNLVAVPTGYVDPRRARSVRYPSVLLSMQGAVDIPRRARSVRYPRSVASQSIIAYTMPRRARSVRYPVKGLQPSVGPKQAPRRARSVRYPQLSLSKGFHFVCNLLLLFVPRRARSVRYPISSVLNDILSRLDPRRARSVRYPVLYQGVNCTEVPRRARSVRYPFSNVTWFHAIVSPRRARSVRYPRLTLGVYDYLVSTQPRRARSVRYPKESVQTFFKLVPRRARSVRYPNVVIKVCEFQFCNYPFLGVYYHPRRARSVRYPIETISLAGPRRARSVRYPANSVFNICQAVTANVNALLPRRARSVRYPNEFYAYLRKHPRRARSVRYPFPQSAPHGVVFLHVTYVPAQPRRARSVRYPNPVLPFNDGVYFAPRRARSVRYPISDYDYYRYNPRRARSVRYPSLIDLQELPRRARSVRYPLGGMSYYCKSHKPSISFPLCANPRRARSVRYPIQLSSYSLFPRRARSVRYPYVYLPYPDPSRILGAGCFVDPRRARSVRYPETICAPLTVFFPRRARSVRYPQVAVLYQDVNCTEVPVAIHPRRARSVRYPVTGLFKDCSKPRRARSVRYPFFSNVTWFHAIHVSPRRARSVRYPNYTVSCSPFTINCQEPPRRARSVRYPMMFVKHKHAFLPRRARSVRYPGFNCYFPLQPYGFQPRRARSVRYPAAAYYVGYLPRRARSVRYPEFQFCNYPFLGVYHKPRRARSVRYPDGYVMHANYIPRRARSVRYPEHVQIHTIPRRARSVRYPEFQFCNDPFLGVYYHPRRARSVRYPSHGKQVVSDIDYVPLKSATCITRPRRARSVRYPSLRCGACIRRPFLCCKPRRARSVRYPFFSNVTWFH

SEQ ID NO: 833 - protein, 2537 aa, Artificial Sequence
  Concatemer 2 from FIG 19
GPKVKYLYFIKPRRARSVRYPTEISFMLWCKDGPRRARSVRYPLNDLCFTNVYADSFVIRGPRRARSVRYPWFTALTQHPRRARSVRYPLSVNPYVCNAPRRARSVRYPARSVARQSIIAYTMSPRRARSVRYPTYACWHHSIGFDYVYPRRARSVRYPVMFLARGIVFMCVDYCPIFFIPRRARSVRYPAGAALQIPFAPRRARSVRYPPVLKGVKLPRRARSVRYPSPGVVNPVMEPRRARSVRYPKNTVCTVCGMPRRARSVRYPKLSYGIAIVREVLSDRELHLSPRRARSVRYPVEHVTFFIYNKIVDEPRRARSVRYPNNLVVMAYPRRARSVRYPVLGSLAATVPRRARSVRYPVFSQCVNLTPRRARSVRYPIEVQGYKSVNITPRRARSVRYPPEHSLAEYPRRARSVRYPSMWALIISVTSNYPRRARSVRYPLEILDITPCSFGGVSVITPPRRARSVRYPYDFVVSKGPRRARSVRYPLPINVIVFPRRARSVRYPQLALSKGVHFVCNLLLLFVTVYPRRARSVRYPKNPLLYDANYFLCWHTNCYDYCIPYPRRARSVRYPFLVLLPLVSSQCVNLTPRRARSVRYPRVEAFEYYPRRARSVRYPLSPVALRQMSCAAGPRRARSVRYPVQLRVIGHPRRARSVRYPTTVAAFHQECSLQLCTQHQPYVVDPRRARSVRYPHPNCVNCLDDRCILHCANFNVPRRARSVRYPGASCCLYCRCHIDHPRRARSVRYPFCLEASFNYLPRRARSVRYPISEHDYHIGPRRARSVRYPCLPFTINCQKPPRRARSVRYPDVLYQPPQPRRARSVRYPAPGCDVTDVTQLYLPRRARSVRYPSINVANYQPRRARSVRYPVVNAANVYLKHPRRARSVRYPVLVQSTQWSLFFFFYENAFLPFAMGPRRARSVRYPQCVQLHNDILLAKPRRARSVRYPYEPLTQDHVDILGPLSAQTGIAVLDMCASLKELPRRARSVRYPTDTCVEHVTFFIYNPRRARSVRYPYDANYFLCWHPRRARSVRYPAPLIELCVDPRRARSVRYPYNLLKDCPAVAKHDFFKFPRRARSVRYPRTCCLCDRRATCFSTPRRARSVRYPFSVAALTNNVAFQTVPRRARSVRYPERFVSLAIDAYPLTKPRRARSVRYPALCEKALKYFPIDKCSRIIPAPRRARSVRYPRVDFCGKGYHLMSFPQSAPHGVVPRRARSVRYPGVHFVCNLLLLFVIVYSPRRARSVRYPTFKVSIWNLDYIPRRARSVRYPSDRVVFVLWAHGFEPRRARSVRYPFAFACPDGVKHVYQLRARSVSPKLFIRQEPRRARSVRYPRSVYPVASPPRRARSVRYPALLAVFHSASKIITLPRRARSVRYPIHFYSKWYIRVGAKPRRARSVRYPSAPLIELCLDEPRRARSVRYPANFCALILAYCNKPRRARSVRYPMMFVKHKHAFLCLFLLPSFATVAYFNMVYMPAPRRARSVRYPISEHDYQIGGPRRARSVRYPSDDAVVCFPRRARSVRYPCANFNVLFSTVFPPTSFGPRRARSVRYPSMWALIISVTSNYSGVVTIVMFLARGIVFPRRARSVRYPYADVFHLYLQYIRKLHDPRRARSVRYPFNSVCRLMPRRARSVRYPSEAFLIGCNPRRARSVRYPKHWPQIAQFAPSASPRRARSVRYPINFVRIIMRLWLCCKCRPRRARSVRYPEEIIYNLLKDCPAVAKPRRARSVRYPSRIIPARARVDCFDKFPRRARSVRYPEQYVFCTVNALPRRARSVRYPEVFAQVKQIYKTPRRARSVRYPASQGLVASIPRRARSVRYPQLALSKGFHFVCNLLLPRRARSVRYPTTVMFLARGIVFMCVEYCPIFFIPRRARSVRYPEGVVDYGARFYFYTPRRARSVRYPTQALPHRQPRRARSVRYPVAAGLEAPFFYLYALVYFLQSINPRRARSVRYPLIAIVMVTIMLCCITSCCSCLKGPRRARSVRYPAWLYAAVIPRRARSVRYPAGFSLWVYKPRRARSVRYPECAQVLSETVMCGGSLYVKPRRARSVRYPGSNVFQTRAGCLIGAEPRRARSVRYPVTTVIFLARGIVFMCVEYPRRARSVRYPVLVQSTQWSLFFFLYENAFLPFAMGPRRARSVRYPNYQCGHYKHIPRRARSVRYPWNVVRIKIVQMLSPRRARSVRYPTEIYQAGSTPRRARSVRYPPINLVRGLPQGFSVLEPLVDPRRARSVRYPSAAYYVGYLQLRTFLLKPRRARSVRYPFEHIVYGDFPRRARSVRYPETKCTLKSFTVEKGPRRARSVRYPKHWPQIAQFPRRARSVRYPKCAYWVPRASPRRARSVRYPAYYVGYLQPRTFLLKPRRARSVRYPIKVCEFQFCNDPFLGVYHPRRARSVRYPTRAKVGILCITSPRRARSVRYPSYLFQHANLDSCKRPRRARSVRYPMTSCCSCLKGCCSCGSCCKFPRRARSVRYPLVLLPLVSSQCVNFPRRARSVRYPCLNRVCTNPRRARSVRYPAVLYQGVNCTEVPFAIHADQL

SEQ ID NO: 834 - protein, 2536 aa, Artificial Sequence
  Concatemer 3 from FIG 19
LECNVKTTEVVGDIILKPRRARSVRYPEVTPSGTWLTYTGAIKLPRRARSVRYPLKEILVTYNCCDDDPRRARSVRYPINLVRDLPQGFSALEPLVDLPIPRRARSVRYPETFVTHSKGLPRRARSVRYPYDNLQFISLEIPRRARSVRYPAKYTQLCQYLNTLTLAVPYNMRVIHFGPRRARSVRYPVNCTEVPVAIHADQLPRRARSVRYPISEHDYQIPRRARSVRYPTSGVGYQPYRVVVLPRRARSVRYPITNCVKMLCTHPRRARSVRYPVVNPVMEPPRRARSVRYPHYQECVRGTTVLLKEPCSSGPRRARSVRYPSYELQTPFEIKLAKKPRRARSVRYPSSIVITSGPRRARSVRYPKACVEEVTTTPRRARSVRYPDKACPLIAAVITREVGFVPRRARSVRYPYCPRHVICTSEPRRARSVRYPANSIVCRFDTRVLSNLPRRARSVRYPSSIVITSVPRRARSVRYPFLYIIKLIFLWLLWPVTLACFVLAAVYRIPRRARSVRYPMADLVYALPRRARSVRYPKLGASQRVPRRARSVRYPFRSSVLHSTRDLPRRARSVRYPFFSNVTWFHVSPRRARSVRYPAFASEAARVVRSIPRRARSVRYPSSPDAVTAYNGYPRRARSVRYPKASCTLSEQLDFIPRRARSVRYPGNCDVVIGIVPRRARSVRYPYTELEPPCRFVTDPRRARSVRYPAEVQIDRLPRRARSVRYPRLNVGDYFVLTSHTPRRARSVRYPFSASTSAFVETVKGLDYKAFKQIVESCPRRARSVRYPQLALFKGVHFVCNLLLLFPRRARSVRYPKEITVATSRTLSYYKLGASQRVAPRRARSVRYPSQDLSVVSPRRARSVRYPEGSVRVVTTFPRRARSVRYPPNFVFPLNSIIKTIQPRPRRARSVRYPAFKLNIKLLGVGGKPCPRRARSVRYPTLPVNVAFELPRRARSVRYPTQALLQRQPRRARSVRYPSPGVFNPVMEPPRRARSVRYPVCNLLLLFVTVYSHLPRRARSVRYPAAGLEAPFLYLYVLVYFLQSINFVRPRRARSVRYPAPLIELCVPRRARSVRYPHPNCVNCSDDRCILHCANFNVPRRARSVRYPFKELLVYAADPAMHAPRRARSVRYPKLTCATTRQVVNVVTTKIALPRRARSVRYPFRSSVLHSTQDLPRRARSVRYPSVASQSIIAYTMSLPRRARSVRYPLVDFQVTIAEILLIIMPRRARSVRYPYDLSVVNARPRRARSVRYPFCKLHNWNCVNCDTFCAGSTPRRARSVRYPGVGGKPCIKVPRRARSVRYPELVIGAVILRGHLRIAGHHLGPRRARSVRYPTPLIQPIGALPRRARSVRYPTCFSVAALTNNVAFPRRARSVRYPTIATYCTGSIPCSVCLSGLDSLDPRRARSVRYPCANFNVLFSTVFPFTSFGPRRARSVRYPTKDVVECLKLSHQSPRRARSVRYPIKDLPKEITVATSRTLSYPRRARSVRYPIMASLVLARKHTTCCSLSHRFYRLANECAQVLPRRARSVRYPSYFAIGLALYYPSARPRRARSVRYPKSASVYYSQLPRRARSVRYPDTSLKLKECVMYPRRARSVRYPFRELGVVHNQDVNLHSPRRARSVRYPVAAGLEAPFLYLYALVYFLQSINFVRIIMRLWLCWKCPRRARSVRYPVTANVNALLPRRARSVRYPSEAVEAPLVGTPVCINGLMLPRRARSVRYPINAACRKVQHMVVKAPRRARSVRYPETTVDIVVFDEPRRARSVRYPTYASALWEIQQVVDADSKIVQLSEPRRARSVRYPRAKHYVYIGDPAQLPAPRTLPRRARSVRYPDGCVPLNIIPLTTAPRRARSVRYPKLMVVIPDYPRRARSVRYPPSFLGRYMPRRARSVRYPFGTVYEKLKPVLDWPRRARSVRYPAALALLLLDRLPRRARSVRYPEIYQAGSKPRRARSVRYPDYYQLYSTQPRRARSVRYPLQSLQTYVTQQLIRAAPRRARSVRYPNFRVQPTESIVRFPRRARSVRYPGEVPVSIINNTPRRARSVRYPYALVYFLQSINFVIIIMRLWLCWPRRARSVRYPLKKLKKSLNVAKPRRARSVRYPFTGCVIAWPRRARSVRYPSELVIGAVILRPRRARSVRYPPINLVRGLPQGFSALEPLVDPRRARSVRYPHEFCSQHTMLVKPRRARSVRYPRFQLHRSYLTPPRRARSVRYPRNLQHRLYECLYRNPRRARSVRYPFNSVCRFMPRRARSVRYPIPIRASLPFGWLIVGPRRARSVRYPALLAVFQSASKIITLPRRARSVRYPFEYVSQPFLMPRRARSVRYPKQYGDCLGNIPRRARSVRYPVDTSLSSLKLKDCVMPRRARSVRYPYGIIWVATEPRRARSVRYPANSVFNICQSVTANVNALLPRRARSVRYPQEHYVRITGLPRRARSVRYPYDPLQPELPRRARSVRYPEVFAQVKQIPRRARSVRYPFLVLLPLVSIQCVNLTPRRARSVRYPKQYGDCLGDIPRRARSVRYPYNLLKGCPAVAKHDF

SEQ ID NO: 835 - protein, 2515 aa, Artificial Sequence
  Concatemer 4 from FIG 19
ANPVLPFNDGVYFAPRRARSVRYPGKPVPYCYDTNPRRARSVRYPVTMPLGYVTHGLPRRARSVRYPFNCYFPLQSYGFPRRARSVRYPPINLVRDLPQGFSVLEPLVDLPIGPRRARSVRYPQWNLVIGFLFLTWICLLQFAYPRRARSVRYPSDFVRATATIPIQASLPFGWLIPRRARSVRYPAVHECFVKRVDPRRARSVRYPETQALPQRPRRARSVRYPLLNVPLHGTILTRPRRARSVRYPRLCAYCCNIVNVSLVKPSFYPRRARSVRYPEVTPSGTWPRRARSVRYPDVVAIDYKHYPRRARSVRYPSPDVDLADIPRRARSVRYPKNPLLYDANYFLCCHTNCYDYCIPRRARSVRYPNIGCNHTGVVGEPRRARSVRYPAKLLHKPIVWHVPRRARSVRYPVRTNVYLAVFDKPRRARSVRYPVPVVDSYYSLLMPRRARSVRYPDQDVLFAYPRRARSVRYPATNVVIKVCEFQFPRRARSVRYPYDKLQFISLEIPRRARSVRYPSVDCTMYIPRRARSVRYPSDFVRATAPRRARSVRYPASQGLLASIPRRARSVRYPPFTINCQEPKPRRARSVRYPFKLASHMYPRRARSVRYPLMNVLTLVYKVYYGPRRARSVRYPSVFQSASKIITLPRRARSVRYPYLGGMSYYCKSHKLPISFPLCANPRRARSVRYPNCYDYCIPYNPRRARSVRYPYPSLETIQITISPRRARSVRYPHFAIGLALYYPSARIVYTACSHAAVDALCEKALKYLPIDKCSRIIPARARVPRRARSVRYPSTFKCYGVPRRARSVRYPGLKLKDCVMYPRRARSVRYPDKYVRNLQHRLYECLYPRRARSVRYPISVTTEILPVSMPRRARSVRYPTLQCIMLVYCFLGYFCTCYFGLFCLLNRYPRRARSVRYPQIELKFNPPALQDAYPRRARSVRYPDCATVHTAPRRARSVRYPIRRPFLCCKCCYDHVISTSHPRRARSVRYPLPFTINCQELPRRARSVRYPDANYFLCWHTNCYHYCIPYNPRRARSVRYPVVADAVIKTLPRRARSVRYPRQALLKTVQFCPRRARSVRYPTDVVYRAFPRRARSVRYPTLGVLVPHVGEIPVAYRKVLLRPRRARSVRYPVMCGGSLYVKPRRARSVRYPFQTLLALHRSYLTPRRARSVRYPVLSEARQHPRRARSVRYPGKIQDSLFSTASALGKLQDVVNQPRRARSVRYPKGFCDLKGKYVQIPTTCAPRRARSVRYPGVITHDVSSAPRRARSVRYPNLIIKNLSKSPRRARSVRYPIAMACLVGLMWLSYFIASFRLFPRRARSVRYPSDIDITFLKKDAPYIVGDVVQEGVLPRRARSVRYPVKDCVVLHSYFTSDYYQLYPRRARSVRYPTFSVLACYPRRARSVRYPTRAKVGILCIMSPRRARSVRYPSQHTMLVKQGDDYVYLPYPRRARSVRYPYRLANECAQVLSEMVMCGGSLYVKPGPRRARSVRYPIRNLQHRLYECLYRPRRARSVRYPTGLHPTQAPTHLSVDTPRRARSVRYPLAWPLIVTALPRRARSVRYPLTQYNRYLALYNKYKYFPRRARSVRYPAQSFLNRVCGVSAARLTPRRARSVRYPIAANTVIWPRRARSVRYPCYTPSKLIEYTPRRARSVRYPDSYFVVKRPRRARSVRYPSEFSSLPSYAAFATAQPRRARSVRYPESVVKDCVVLHSYFPRRARSVRYPGYQPYRVVVLSFELLHAPATVCPRRARSVRYPEVPANSTVLSFCAFAPRRARSVRYPTVLKKCKSAFYILPSIPRRARSVRYPINFVRIIMRLWLCLKCRPRRARSVRYPYAKPFLNKVVSTTPRRARSVRYPFLYENAFLPFAMGVIAMSPRRARSVRYPIEELFYSYATHPRRARSVRYPGVYCCREHPRRARSVRYPDKSAFVNLKQLPFFYYSDSPRRARSVRYPDYDCVSFCYMHHMEPRRARSVRYPSDFVRATATIPIRASLPFGWLIPRRARSVRYPARDLICAQKFPRRARSVRYPISNCVADYPRRARSVRYPISNCVADYSVLYNSAPRRARSVRYPVPQEHYVRITGLYPTLNPRRARSVRYPALGKLQDVVNQNPRRARSVRYPLRIAGHHLGRCPRRARSVRYPVKDCVLLHSYFTSDYYQLYPRRARSVRYPAALQIPFAPRRARSVRYPFSNVTWFHAIHVSGTNPRRARSVRYPHYVRITGLYPTLNILPRRARSVRYPDDRCILHCANFNVLFSTVFPPRRARSVRYPSSVLHSTQDFPRRARSVRYPGSCGSVGFPRRARSVRYPYFTSDYYQLYSTQLIPRRARSVRYPLKLKDCVMYPRRARSVRYPRIIPARARVECFDKFPRRARSVRYPTQNVLYENQKPRRARSVRYPNHDLYCQVHGNAHVASCDAIMTRPRRARSVRYPTDAVDCALPRRARSVRYPIKVCEFQFCNDPYYPRRARSVRYPDPIHSLRVCVPRRARSVRYPLLYDANYFLCWHINCYDYCIPY

SEQ ID NO: 836 - protein, 862 aa, Artificial Sequence
  Concatemer 1 from FIG 20
NIGCNHTGVVGEPRRARSVRYPLKEILVTYNCCDDDPRRARSVRYPCSNLLLQYGSFCTQLNRPRRARSVRYPGSNVFQTRAGCLIGAEPRRARSVRYPAEVQIDRLPRRARSVRYPISVTTEILPVSMPRRARSVRYPFTGCVIAWPRRARSVRYPINAACRKVQHMVVKAPRRARSVRYPARDLICAQKFPRRARSVRYPLPINVIVFPRRARSVRYPFSASTSAFVETVKGLDYKAFKQIVESCPRRARSVRYPRKIFVDGVPFVVSTGYPRRARSVRYPFRELGVVHNQDVNLHSPRRARSVRYPEGVVDYGARFYFYTPRRARSVRYPTYACWHHSIGFDYVYPRRARSVRYPNEFYAYLRKHPRRARSVRYPAKLLHKPIVWHVPRRARSVRYPTDAVDCALPRRARSVRYPDVVAIDYKHYPRRARSVRYPKAVFISPYPRRARSVRYPQIGVVREFPRRARSVRYPYADVFHLYLQYIRKLHDPRRARSVRYPVMCGGSLYVKPRRARSVRYPFGTVYEKLKPVLDWPRRARSVRYPNFRVQPTESIVRFPRRARSVRYPYVYLPYPDPSRILGAGCFVDPRRARSVRYPSYELQTPFEIKLAKKPRRARSVRYPRVDFCGKGYHLMSFPQSAPHGVVPRRARSVRYPVVADAVIKTLPRRARSVRYPISNCVADYPRRARSVRYPTRAKVGILCIMSPRRARSVRYPIRRPFLCCKCCYDHVISTSHPRRARSVRYPLECNVKTTEVVGDIILKPRRARSVRYPGNCDVVIGIVPRRARSVRYPGCDVTDVTQLYLGGMSYYCKSHKPPISFPLCANGQVFGLPRRARSVRYPRAKHYVYIGDPAQLPAPRTL

SEQ ID NO: 837 - protein, 847 aa, Artificial Sequence
  Concatemer 2 from FIG 20
AFASEAARVVRSIPRRARSVRYPAQSFLNRVCGVSAARLTPRRARSVRYPRNLQHRLYECLYRNPRRARSVRYPGVNLVAVPTGYVDPRRARSVRYPKQYGDCLGDIPRRARSVRYPAGFSLWVYKPRRARSVRYPEQYVFCTVNALPRRARSVRYPYDPLQPELPRRARSVRYPSRELKVTFFPRRARSVRYPKLGASQRVPRRARSVRYPKACVEEVTTTPRRARSVRYPFKELLVYAADPAMHAPRRARSVRYPFKLASHMYPRRARSVRYPNNLVVMAYPRRARSVRYPIMASLVLARKHTTCCSLSHRFYRLANECAQVLPRRARSVRYPLLNVPLHGTILTRPRRARSVRYPVTANVNALLPRRARSVRYPAIKCVPQADVEWKPRRARSVRYPSHGKQVVSDIDYVPLKSATCITRPRRARSVRYPKASCTLSEQLDFIPRRARSVRYPANFCALILAYCNKPRRARSVRYPIEELFYSYATHPRRARSVRYPSVELKHFFFAPRRARSVRYPDSYFVVKRPRRARSVRYPKGVQIPCTCGKPRRARSVRYPKLTCATTRQVVNVVTTKIALPRRARSVRYPQEHYVRITGLPRRARSVRYPSSPDAVTAYNGYPRRARSVRYPVTMPLGYVTHGLPRRARSVRYPLEILDITPCSFGGVSVITPPRRARSVRYPDPIHSLRVCVPRRARSVRYPRTCCLCDRRATCFSTPRRARSVRYPMTSCCSCLKGCCSCGSCCKFPRRARSVRYPWNVVRIKIVQMLSPRRARSVRYPDKSAFVNLKQLPFFYYSDSPRRARSVRYPYPSLETIQITISPRRARSVRYPTVLKKCKSAFYILPSI

SEQ ID NO: 838 - protein, 849 aa, Artificial Sequence
  Concatemer 3 from FIG 20
ETFVTHSKGLPRRARSVRYPRSVYPVASPPRRARSVRYPNHDLYCQVHGNAHVASCDAIMTRPRRARSVRYPFNCYFPLQSYGFPRRARSVRYPVNCTEVPVAIHADQLPRRARSVRYPHFAIGLALYYPSARIVYTACSHAAVDALCEKALKYLPIDKCSRIIPARARVPRRARSVRYPFSVAALTNNVAFQTVPRRARSVRYPPSFLGRYMPRRARSVRYPGYLPQNAVVKIYCPACHNSEPRRARSVRYPYDKLVSSFPRRARSVRYPHEFCSQHTMLVKPRRARSVRYPTGLHPTQAPTHLSVDTPRRARSVRYPSELVIGAVILRPRRARSVRYPIEVQGYKSVNITPRRARSVRYPFCKLHNWNCVNCDTFCAGSTPRRARSVRYPKLNVGDYFVLTSHTVMPLSPRRARSVRYPTIATYCTGSIPCSVCLSGLDSLDPRRARSVRYPFCLEASFNYLPRRARSVRYPKCAYWVPRASPRRARSVRYPSYLFQHANLDSCKRPRRARSVRYPTQNVLYENQKPRRARSVRYPQIELKFNPPALQDAYPRRARSVRYPIKDLPKEITVATSRTLSYPRRARSVRYPYELKHGTFTCAPRRARSVRYPSDIDITFLKKDAPYIVGDVVQEGVLPRRARSVRYPGVITHDVSSAPRRARSVRYPTENLLLYIDPRRARSVRYPVPVVDSYYSLLMPRRARSVRYPALGKLQDVVNQNPRRARSVRYPEVFAQVKQIPRRARSVRYPNYQCGHYKHIPRRARSVRYPAVHECFVKRVDPRRARSVRYPATNVVIKVCEFQFPRRARSVRYPSVDCTMYIPRRARSVRYPLFVVEVVDKYFDCYDGGC

SEQ ID NO: 839 - protein, 851 aa, Artificial Sequence
  Concatemer 4 from FIG 20
ACIDCSARHIPRRARSVRYPLNDLCFTNVYADSFVIRGPRRARSVRYPSDRVVFVLWAHGFEPRRARSVRYPMADLVYALPRRARSVRYPAAAYYVGYLPRRARSVRYPGYQPYRVVVLSFELLHAPATVCPRRARSVRYPYDLSVVNARPRRARSVRYPGTNLPLQLGFPRRARSVRYPDDRCILHCANFNVLFSTVFPPRRARSVRYPCLNRVCTNPRRARSVRYPSEAVEAPLVGTPVCINGLMLPRRARSVRYPRVEAFEYYPRRARSVRYPIVKFISTCACEIVPRRARSVRYPGVYCCREHPRRARSVRYPERFVSLAIDAYPLTKPRRARSVRYPVRTNVYLAVFDKPRRARSVRYPVTGLFKDCSKPRRARSVRYPLRIAGHHLGRCPRRARSVRYPARDLSLQFPRRARSVRYPDNVLSTFISAAPRRARSVRYPPNFVFPLNSIIKTIQPRPRRARSVRYPIETISLAGPRRARSVRYPYAKPFLNKVVSTTPRRARSVRYPVREVLSDRELHLSWEVPRRARSVRYPANSIVCRFDTRVLSNLPRRARSVRYPLQSLQTYVTQQLIRAAPRRARSVRYPRHSLSHFVNLPRRARSVRYPVQQESPFVMMPRRARSVRYPVVNAANVYLKHPRRARSVRYPTKDVVECLKLSHQSPRRARSVRYPKESVQTFFKLVPRRARSVRYPLQKAAITILDGISQYSLRLIPRRARSVRYPPEHSLAEYPRRARSVRYPSLIDLQELPRRARSVRYPFFSNVTWFHPRRARSVRYPNPVLPFNDGVYFAPRRARSVRYPMPVCVETKAPRRARSVRYPKSASVYYSQLPRRARSVRYPAALQIPFA

SEQ ID NO: 840 - protein, 1213 aa, Artificial Sequence
  Concatemer 4 from FIG 20
NIGCNHTGVVGEPRRARSVRYPLKEILVTYNCCDDDPRRARSVRYPISNCVADYSVLYNSAPRRARSVRYPAYYVGYLQPRTFLLKPRRARSVRYPREGVFVSNPRRARSVRYPFRSSVLHSTQDLPRRARSVRYPEQYVFCTVNALPRRARSVRYPANPVLPFNDGVYFAPRRARSVRYPERFVSLAIDAYPLTKPRRARSVRYPYDKLVSSFPRRARSVRYPLQKAAITILDGISQYSLRLIPRRARSVRYPKACVEEVTTTPRRARSVRYPKESVQTFFKLVPRRARSVRYPLFVVEVVDKYFDCYDGGCPRRARSVRYPFRELGVVHNQDVNLHSPRRARSVRYPAVHECFVKRVDPRRARSVRYPEFQFCNDPFLGVYYHPRRARSVRYPSPDVDLADIPRRARSVRYPIEVQGYKSVNITPRRARSVRYPYPSLETIQITISPRRARSVRYPKSASVYYSQLPRRARSVRYPVQQESPFVMMPRRARSVRYPLRIAGHHLGRCPRRARSVRYPTGLHPTQAPTHLSVDTPRRARSVRYPANSIVCRFDTRVLSNLPRRARSVRYPSRELKVTFFPRRARSVRYPGKIQDSLFSTASALGKLQDVVNQPRRARSVRYPARSVARQSIIAYTMSPRRARSVRYPPEHSLAEYPRRARSVRYPRVDFCGKGYHLMSFPQSAPHGVVPRRARSVRYPNFRVQPTESIVRFPRRARSVRYPGSNVFQTRAGCLIGAEPRRARSVRYPNPVLPFNDGVYFAPRRARSVRYPALGKLQDVVNQNPRRARSVRYPPVLKGVKLPRRARSVRYPFSASTSAFVETVKGLDYKAFKQIVESCPRRARSVRYPAALQIPFAPRRARSVRYPRFQLHRSYLTPPRRARSVRYPQVAVLYQDVNCTEVPVAIHPRRARSVRYPFSNVTWFHAIVSPRRARSVRYPWNVVRIKIVQMLSPRRARSVRYPQIELKFNPPALQDAYPRRARSVRYPSHGKQVVSDIDYVPLKSATCITRPRRARSVRYPETKCTLKSFTVEKGPRRARSVRYPLVLLPLVSSQCVNFPRRARSVRYPFFSNVTWFHPRRARSVRYPIRRPFLCCKCCYDHVISTSHPRRARSVRYPVLYQGVNCTEVPRRARSVRYPIMASLVLARKHTTCCSLSHRFYRLANECAQVLPRRARSVRYPLLNVPLHGTILTRPRRARSVRYPVVNAANVYLKH

SEQ ID NO: 841 - protein, 1200 aa, Artificial Sequence
  Concatemer 1 from FIG 21
AFASEAARVVRSIPRRARSVRYPAQSFLNRVCGVSAARLTPRRARSVRYPSDRVVFVLWAHGFEPRRARSVRYPSVLNDILARLPRRARSVRYPFLVLLPLVSSQCVNLTPRRARSVRYPAGFSLWVYKPRRARSVRYPPINLVRGLPQGFSALEPLVDPRRARSVRYPEVFAQVKQIYKTPRRARSVRYPRSVASQSIIAYTMPRRARSVRYPPSFLGRYMPRRARSVRYPYADVFHLYLQYIRKLHDPRRARSVRYPSELVIGAVILRPRRARSVRYPKCAYWVPRASPRRARSVRYPRKIFVDGVPFVVSTGYPRRARSVRYPGVYCCREHPRRARSVRYPIKDLPKEITVATSRTLSYPRRARSVRYPNVVIKVCEFQFCNYPFLGVYYHPRRARSVRYPEIYQAGSKPRRARSVRYPKQYGDCLGNIPRRARSVRYPSVASQSIIAYTMSLPRRARSVRYPFCLEASFNYLPRRARSVRYPVNCTEVPVAIHADQLPRRARSVRYPNYQCGHYKHIPRRARSVRYPSAAYYVGYLQLRTFLLKPRRARSVRYPIETISLAGPRRARSVRYPPNFVFPLNSIIKTIQPRPRRARSVRYPYELKHGTFTCAPRRARSVRYPRTCCLCDRRATCFSTPRRARSVRYPIEELFYSYATHPRRARSVRYPKLTCATTRQVVNVVTTKIALPRRARSVRYPFPQSAPHGVVFLHVTYVPAQPRRARSVRYPSVDCTMYIPRRARSVRYPFRSSVLHSTRDLPRRARSVRYPQIGVVREFPRRARSVRYPEGVVDYGARFYFYTPRRARSVRYPSYELQTPFEIKLAKKPRRARSVRYPGNCDVVIGIVPRRARSVRYPAGAALQIPFAPRRARSVRYPTYACWHHSIGFDYVYPRRARSVRYPANFCALILAYCNKPRRARSVRYPQEHYVRITGLPRRARSVRYPEFQFCNYPFLGVYHKPRRARSVRYPHFPRKGVFVSNPRRARSVRYPVVADAVIKTLPRRARSVRYPGFNCYFPLQPYGFQPRRARSVRYPAEVQIDRLPRRARSVRYPEVFAQVKQIPRRARSVRYPYAKPFLNKVVSTTPRRARSVRYPVMCGGSLYVKPRRARSVRYPTDAVDCALPRRARSVRYPPINLVRGLPQGFSVLEPLVDPRRARSVRYPSTFKCYGVPRRARSVRYPKLNVGDYFVLTSHTVMPLS

SEQ ID NO: 842 - protein, 1212 aa, Artificial Sequence
  Concatemer 2 from FIG 21
ETFVTHSKGLPRRARSVRYPRSVYPVASPPRRARSVRYPNHDLYCQVHGNAHVASCDAIMTRPRRARSVRYPMADLVYALPRRARSVRYPTEIYQAGSTPRRARSVRYPYIWLGFIAGLIAIVMVTIMLCCMTSCCSCLKPRRARSVRYPFQTLLALHRSYLTPRRARSVRYPTKDVVECLKLSHQSPRRARSVRYPDVVAIDYKHYPRRARSVRYPKLGASQRVPRRARSVRYPLPINVIVFPRRARSVRYPTENLLLYIDPRRARSVRYPVPVVDSYYSLLMPRRARSVRYPKASCTLSEQLDFIPRRARSVRYPVTMPLGYVTHGLPRRARSVRYPNEFYAYLRKHPRRARSVRYPRAKHYVYIGDPAQLPAPRTLPRRARSVRYPGCDVTDVTQLYLGGMSYYCKSHKPPISFPLCANGQVFGLPRRARSVRYPKAVFISPYPRRARSVRYPLNDLCFTNVYADSFVIRGPRRARSVRYPMTSCCSCLKGCCSCGSCCKFPRRARSVRYPLIAIVMVTIMLCCITSCCSCLKGPRRARSVRYPAKLLHKPIVWHVPRRARSVRYPYDPLQPELPRRARSVRYPFNCYFPLQSYGFPRRARSVRYPLECNVKTTEVVGDIILKPRRARSVRYPFKELLVYAADPAMHAPRRARSVRYPSVELKHFFFAPRRARSVRYPDKSAFVNLKQLPFFYYSDSPRRARSVRYPARDLICAQKFPRRARSVRYPINAACRKVQHMVVKAPRRARSVRYPATNVVIKVCEFQFPRRARSVRYPAAAYYVGYLPRRARSVRYPSSPDAVTAYNGYPRRARSVRYPGFNCYSPLQSYGFQPRRARSVRYPFFSNVTWFHVSPRRARSVRYPTVLKKCKSAFYILPSIPRRARSVRYPRHSLSHFVNLPRRARSVRYPCLNRVCTNPRRARSVRYPFFSNVTWFHAIHVSPRRARSVRYPFGTVYEKLKPVLDWPRRARSVRYPTYGVGYQPYRVVVLSPRRARSVRYPFKLASHMYPRRARSVRYPISNCVADYPRRARSVRYPDSYFVVKRPRRARSVRYPAIKCVPQADVEWKPRRARSVRYPTQNVLYENQKPRRARSVRYPFSNVTWFHAIHVSGTNPRRARSVRYPISVTTEILPVSMPRRARSVRYPKQYGDCLGDIPRRARSVRYPFTGCVIAWPRRARSVRYPSSVLHSTQDFPRRARSVRYPSLIDLQEL

SEQ ID NO: 843 - protein, 1203 aa, Artificial Sequence
  Concatemer 3 from FIG 21
ACIDCSARHIPRRARSVRYPINLVRDLPQGFSALEPLVDLPIPRRARSVRYPRNLQHRLYECLYRNPRRARSVRYPGVNLVAVPTGYVDPRRARSVRYPTSGVGYQPYRVVVLPRRARSVRYPHFAIGLALYYPSARIVYTACSHAAVDALCEKALKYLPIDKCSRIIPARARVPRRARSVRYPYVYLPYPDPSRILGAGCFVDPRRARSVRYPKGVQIPCTCGKPRRARSVRYPDDRCILHCANFNVLFSTVFPPRRARSVRYPIVKFISTCACEIVPRRARSVRYPNNLVVMAYPRRARSVRYPRVEAFEYYPRRARSVRYPFSVAALTNNVAFQTVPRRARSVRYPFEYVSQPFLMPRRARSVRYPEPLLKGVKLPRRARSVRYPGVITHDVSSAPRRARSVRYPTIATYCTGSIPCSVCLSGLDSLDPRRARSVRYPIKVCEFQFCNDPYYPRRARSVRYPCSNLLLQYGSFCTQLNRPRRARSVRYPDPIHSLRVCVPRRARSVRYPTISVTTEILPVSMAKPRRARSVRYPTRAKVGILCIMSPRRARSVRYPISSVLNDILSRLDPRRARSVRYPSEAVEAPLVGTPVCINGLMLPRRARSVRYPMPVCVETKAPRRARSVRYPVFSQCVNLTPRRARSVRYPGYQPYRVVVLSFELLHAPATVCPRRARSVRYPDNVLSTFISAAPRRARSVRYPVTANVNALLPRRARSVRYPVRTNVYLAVFDKPRRARSVRYPAIPINFTISVTTEILPVSMPRRARSVRYPGTNLPLQLGFPRRARSVRYPYDLSVVNARPRRARSVRYPLEILDITPCSFGGVSVITPPRRARSVRYPGYLPQNAVVKIYCPACHNSEPRRARSVRYPFLVLLPLVSIQCVNLTPRRARSVRYPFQTLLHRSYLTPPRRARSVRYPFCKLHNWNCVNCDTFCAGSTPRRARSVRYPLQSLQTYVTQQLIRAAPRRARSVRYPSYLFQHANLDSCKRPRRARSVRYPHEFCSQHTMLVKPRRARSVRYPSDIDITFLKKDAPYIVGDVVQEGVLPRRARSVRYPVREVLSDRELHLSWEVPRRARSVRYPPINLVRDLPQGFSVLEPLVDLPIGPRRARSVRYPVTGLFKDCSKPRRARSVRYPARDLSLQFPRRARSVRYPAVLYQGVNCTEVPFAIHADQLPRRARSVRYPIKVCEFQFCNDPFLGVYH

SEQ ID NO: 844 - protein, 1519 aa, Artificial Sequence
  Concatemer 1 from FIG 22
YDKLQFISLEIPRRARSVRYPYNLLKDCPAVAKHDFFKFPRRARSVRYPSDRVVFVLWAHGFEPRRARSVRYPTENLLLYIDPRRARSVRYPANSVFNICQSVTANVNALLPRRARSVRYPAGFSLWVYKPRRARSVRYPDQDVLFAYPRRARSVRYPETFVTHSKGLPRRARSVRYPSDDAVVCFPRRARSVRYPAKLLHKPIVWHVPRRARSVRYPFNSVCRFMPRRARSVRYPYELKHGTFTCAPRRARSVRYPDVVAIDYKHYPRRARSVRYPKAVFISPYPRRARSVRYPARDLSLQFPRRARSVRYPIKDLPKEITVATSRTLSYPRRARSVRYPTCFSVAALTNNVAFPRRARSVRYPSRIIPARARVDCFDKFPRRARSVRYPSYELQTPFEIKLAKKPRRARSVRYPKLSYGIAIVREVLSDRELHLSPRRARSVRYPINLVRDLPQGFSALEPLVDLPIPRRARSVRYPLKEILVTYNCCDDDPRRARSVRYPVREVLSDRELHLSWEVPRRARSVRYPQEHYVRITGLPRRARSVRYPRHSLSHFVNLPRRARSVRYPMADLVYALPRRARSVRYPPEHSLAEYPRRARSVRYPFRELGVVHNQDVNLHSPRRARSVRYPLRIAGHHLGRCPRRARSVRYPFCKLHNWNCVNCDTFCAGSTPRRARSVRYPCLNRVCTNPRRARSVRYPFPQSAPHGVVFLHVTYVPAQPRRARSVRYPANSVFNICQAVTANVNALLPRRARSVRYPPNFVFPLNSIIKTIQPRPRRARSVRYPRSVASQSIIAYTMPRRARSVRYPREGVFVSNPRRARSVRYPAFASEAARVVRSIPRRARSVRYPISSVLNDILSRLDPRRARSVRYPLVLLPLVSSQCVNFPRRARSVRYPEFQFCNDPFLGVYYHPRRARSVRYPAAAYYVGYLPRRARSVRYPVFSQCVNLTPRRARSVRYPLLNVPLHGTILTRPRRARSVRYPNPVLPFNDGVYFAPRRARSVRYPSLIDLQELPRRARSVRYPYDPLQPELPRRARSVRYPFLVLLPLVSSQCVNLTPRRARSVRYPSSNVANYQPRRARSVRYPTYGVGYQPYRVVVLSPRRARSVRYPTQNVLYENQKPRRARSVRYPTDAVDCALPRRARSVRYPDKYVRNLQHRLYECLYPRRARSVRYPFLVLLPLVSIQCVNLTPRRARSVRYPLFVVEVVDKYFDCYDGGCPRRARSVRYPHEFCSQHTMLVKPRRARSVRYPAALQIPFAPRRARSVRYPSVDCTMYIPRRARSVRYPNNLVVMAYPRRARSVRYPFRSSVLHSTRDLPRRARSVRYPISNCVADYPRRARSVRYPGYLPQNAVVKIYCPACHNSEPRRARSVRYPVTGLFKDCSKPRRARSVRYPAEVQIDRLPRRARSVRYPSVASQSIIAYTMSLPRRARSVRYPEVFAQVKQIPRRARSVRYPLEILDITPCSFGGVSVITPPRRARSVRYPFFSNVTWFHVSPRRARSVRYPFQTLLALHRSYLT

SEQ ID NO: 845 - protein, 1504 aa, Artificial Sequence
  Concatemer 2 from FIG 22
IRRPFLCCKCCYDHVISTSHPRRARSVRYPLPINVIVFPRRARSVRYPHPNCVNCSDDRCILHCANFNVPRRARSVRYPGVNLVAVPTGYVDPRRARSVRYPIRNLQHRLYECLYRPRRARSVRYPVPQEHYVRITGLYPTLNPRRARSVRYPRQALLKTVQFCPRRARSVRYPYDKLVSSFPRRARSVRYPKLTCATTRQVVNVVTTKIALPRRARSVRYPVVNAANVYLKHPRRARSVRYPTKDVVECLKLSHQSPRRARSVRYPYDLSVVNARPRRARSVRYPACIDCSARHIPRRARSVRYPNYQCGHYKHIPRRARSVRYPKACVEEVTTTPRRARSVRYPFNSVCRLMPRRARSVRYPFKELLVYAADPAMHAPRRARSVRYPSVELKHFFFAPRRARSVRYPRSVYPVASPPRRARSVRYPCANFNVLFSTVFPFTSFGPRRARSVRYPANFCALILAYCNKPRRARSVRYPTVLKKCKSAFYILPSIPRRARSVRYPERFVSLAIDAYPLTKPRRARSVRYPIVKFISTCACEIVPRRARSVRYPDSYFVVKRPRRARSVRYPDDRCILHCANFNVLFSTVFPPRRARSVRYPVTANVNALLPRRARSVRYPLQKAAITILDGISQYSLRLIPRRARSVRYPSHGKQVVSDIDYVPLKSATCITRPRRARSVRYPYAKPFLNKVVSTTPRRARSVRYPFSASTSAFVETVKGLDYKAFKQIVESCPRRARSVRYPISNCVADYSVLYNSAPRRARSVRYPKQYGDCLGNIPRRARSVRYPFRSSVLHSTQDLPRRARSVRYPTEIYQAGSTPRRARSVRYPGTNLPLQLGFPRRARSVRYPFSNVTWFHAIVSPRRARSVRYPPINLVRDLPQGFSVLEPLVDLPIGPRRARSVRYPAGAALQIPFAPRRARSVRYPFSNVTWFHAIHVSGTNPRRARSVRYPTISVTTEILPVSMAKPRRARSVRYPLNDLCFTNVYADSFVIRGPRRARSVRYPECAQVLSETVMCGGSLYVKPRRARSVRYPINAACRKVQHMVVKAPRRARSVRYPRLNVGDYFVLTSHTPRRARSVRYPEPLLKGVKLPRRARSVRYPSDIDITFLKKDAPYIVGDVVQEGVLPRRARSVRYPEFQFCNYPFLGVYHKPRRARSVRYPGFNCYSPLQSYGFQPRRARSVRYPGFNCYFPLQPYGFQPRRARSVRYPFQTLLHRSYLTPPRRARSVRYPKLGASQRVPRRARSVRYPTSGVGYQPYRVVVLPRRARSVRYPALCEKALKYFPIDKCSRIIPAPRRARSVRYPALGKLQDVVNQNPRRARSVRYPKCAYWVPRASPRRARSVRYPISVTTEILPVSMPRRARSVRYPIEVQGYKSVNITPRRARSVRYPFGTVYEKLKPVLDWPRRARSVRYPFCLEASFNYLPRRARSVRYPYDKLQFTSLEIPRRARSVRYPDNVLSTFISAAPRRARSVRYPFTGCVIAWPRRARSVRYPKQYGDCLGDI

SEQ ID NO: 846 - protein, 1502 aa, Artificial Sequence
  Concatemer 3 from FIG 22
QIGVVREFPRRARSVRYPLGGMSYYCKSHKPSISFPLCANPRRARSVRYPDPIHSLRVCVPRRARSVRYPSQHTMLVKQGDDYVYLPYPRRARSVRYPASQGLLASIPRRARSVRYPYRLANECAQVLSEMVMCGGSLYVKPGPRRARSVRYPIMASLVLARKHTTCCSLSHRFYRLANECAQVLPRRARSVRYPLECNVKTTEVVGDIILKPRRARSVRYPSYLFQHANLDSCKRPRRARSVRYPLSVNPYVCNAPRRARSVRYPEQYVFCTVNALPRRARSVRYPVQQESPFVMMPRRARSVRYPMPVCVETKAPRRARSVRYPYLGGMSYYCKSHKLPISFPLCANPRRARSVRYPRKIFVDGVPFVVSTGYPRRARSVRYPVPVVDSYYSLLMPRRARSVRYPVMCGGSLYVKPRRARSVRYPDMYSVMLTPRRARSVRYPGVYCCREHPRRARSVRYPYNLLKGCPAVAKHDFPRRARSVRYPNIGCNHTGVVGEPRRARSVRYPSQHTMLVKQFDDYVYLPYPDPSPRRARSVRYPSTFKCYGVPRRARSVRYPANPVLPFNDGVYFAPRRARSVRYPVTMPLGYVTHGLPRRARSVRYPGCDVTDVTQLYLGGMSYYCKSHKPPISFPLCANGQVFGLPRRARSVRYPYIWLGFIAGLIAIVMVTIMLCCMTSCCSCLKPRRARSVRYPEVFAQVKQIYKTPRRARSVRYPDKSAFVNLKQLPFFYYSDSPRRARSVRYPLQSLQTYVTQQLIRAAPRRARSVRYPFFSNVTWFHPRRARSVRYPRIIPARARVECFDKFPRRARSVRYPFFSNVTWFHAIHVSPRRARSVRYPEGVVDYGARFYFYTPRRARSVRYPGYQPYRVVVLSFELLHAPATVCPRRARSVRYPQVAVLYQDVNCTEVPVAIHPRRARSVRYPFSVAALTNNVAFQTVPRRARSVRYPTDVVYRAFPRRARSVRYPFNCYFPLQSYGFPRRARSVRYPPSFLGRYMPRRARSVRYPKLNVGDYFVLTSHTVMPLSPRRARSVRYPGSNVFQTRAGCLIGAEPRRARSVRYPSVLNDILARLPRRARSVRYPRVDFCGKGYHLMSFPQSAPHGVVPRRARSVRYPCANFNVLFSTVFPPTSFGPRRARSVRYPETKCTLKSFTVEKGPRRARSVRYPNVVIKVCEFQFCNYPFLGVYYHPRRARSVRYPSPDVDLADIPRRARSVRYPSAAYYVGYLQLRTFLLKPRRARSVRYPMTSCCSCLKGCCSCGSCCKFPRRARSVRYPHFPRKGVFVSNPRRARSVRYPNEFYAYLRKHPRRARSVRYPIKVCEFQFCNDPYYPRRARSVRYPYADVFHLYLQYIRKLHDPRRARSVRYPARSVARQSIIAYTMSPRRARSVRYPKSASVYYSQLPRRARSVRYPANSIVCRFDTRVLSNLPRRARSVRYPPVLKGVKLPRRARSVRYPPINLVRGLPQGFSVLEPLVDPRRARSVRYPAPGCDVTDVTQLYL

SEQ ID NO: 847 - protein, 1502 aa, Artificial Sequence; identical to SEQ ID NO: 846
  Concatemer 4 from FIG 22

SEQ ID NO: 848 - protein, 1201 aa, Artificial Sequence
  Concatemer 1 from FIG 23
QLALSKGVYFVCNLLLLFVTVYSPRRARSVRYPAYYVGYLQPRTFLLKPRRARSVRYPSELVIGAVILRPRRARSVRYPRFQLHRSYLTPPRRARSVRYPPVLKGVKLPRRARSVRYPRSVASQSIIAYTMPRRARSVRYPVDTSLSSLKLKDCVMPRRARSVRYPQLSLSKGFHFVCNLLLLFVPRRARSVRYPNCYDYCIPYNPRRARSVRYPKDQVILLNKHIDAYKTFPRRARSVRYPPFTINCQEPKPRRARSVRYPHQPYVVDDPCPIHFYSKWYIRVGPRRARSVRYPYGIIWVATEPRRARSVRYPQLALFKGVHFVCNLLLLFPRRARSVRYPALLAVFHSASKIITLPRRARSVRYPSTFKCYGVPRRARSVRYPEIYQAGSKPRRARSVRYPRLTLGVYDYLVSTQPRRARSVRYPVCNLLLLFVTVYSHLPRRARSVRYPDANYFLCWHTNCYHYCIPYNPRRARSVRYPGSNVFQTRAGCLIGAEPRRARSVRYPINFVRIIMRLWLCLKCRPRRARSVRYPAAAYYVGYLPRRARSVRYPAALALLLLDRLPRRARSVRYPIKVCEFQFCNDPYYPRRARSVRYPISEHDYQIGGPRRARSVRYPDYYQLYSTQPRRARSVRYPVKDCVLLHSYFTSDYYQLYPRRARSVRYPFNCYFPLQSYGFPRRARSVRYPARDLICAQKFPRRARSVRYPIKVCEFQFCNDPFLGVYHPRRARSVRYPVMFLARGIVFMCVDYCPIFFIPRRARSVRYPGFNCYSPLQSYGFQPRRARSVRYPQLALSKGVHFVCNLLLLFVTVYPRRARSVRYPANPVLPFNDGVYFAPRRARSVRYPSDFVRATATIPIRASLPFGWLIPRRARSVRYPPINLVRGLPQGFSVLEPLVDPRRARSVRYPGYQPYRVVVLSFELLHAPATVCPRRARSVRYPILLNKHIDAYKTFPPIEPRRARSVRYPLNDLCFTNVYADSFVIRGPRRARSVRYPKNPLLYDANYFLCCHTNCYDYCIPRRARSVRYPIAMACLVGLMWLSYFIASFRLFPRRARSVRYPVAAGLEAPFFYLYALVYFLQSINPRRARSVRYPFTSDYYQLYSTQLSTYTGVEHVTFFIYNPRRARSVRYPEFQFCNYPFLGVYHKPRRARSVRYPELVIGAVILRGHLRIAGHHLGPRRARSVRYPISVTTEILPVSM

SEQ ID NO: 849 - protein, 1227 aa, Artificial Sequence
  Concatemer 2 from FIG 23
TQALLQRQPRRARSVRYPKNPLLYDANYFLCWHTNCYDYCIPYPRRARSVRYPREGVFVSNPRRARSVRYPFRSSVLHSTQDLPRRARSVRYPLRIAGHHLGRCPRRARSVRYPFFSNVTWFHAIHVSPRRARSVRYPLKLKDCVMYPRRARSVRYPEPLLKGVKLPRRARSVRYPNYTVSCSPFTINCQEPPRRARSVRYPISEHDYHIGPRRARSVRYPCLPFTINCQKPPRRARSVRYPSSIVITSGPRRARSVRYPWFTALTQHPRRARSVRYPETQALPQRPRRARSVRYPLGSLVVRCSFYEDFLEYHDVRVVLPRRARSVRYPINLVRDLPQGFSALEPLVDLPIPRRARSVRYPDTSLKLKECVMYPRRARSVRYPRVDFCGKGYHLMSFPQSAPHGVVPRRARSVRYPGVGGKPCIKVPRRARSVRYPLLYDANYFLCWHINCYDYCIPYPRRARSVRYPVNCTEVPVAIHADQLPRRARSVRYPYFTSDYYQLYSTQLIPRRARSVRYPATNVVIKVCEFQFPRRARSVRYPKHWPQIAQFAPSASPRRARSVRYPLPFTINCQELPRRARSVRYPVFSQCVNLTPRRARSVRYPAVLYQGVNCTEVPFAIHADQLPRRARSVRYPEVTPSGTWPRRARSVRYPSVFQSASKIITLPRRARSVRYPAEVQIDRLPRRARSVRYPFFSNVTWFHPRRARSVRYPSDFVRATAPRRARSVRYPMMFVKHKHAFLPRRARSVRYPGNCDVVIGIVPRRARSVRYPTYGVGYQPYRVVVLSPRRARSVRYPNVVIKVCEFQFCNYPFLGVYYHPRRARSVRYPETKCTLKSFTVEKGPRRARSVRYPFLVLLPLVSSQCVNLTPRRARSVRYPVLYQGVNCTEVPRRARSVRYPFLYIIKLIFLWLLWPVTLACFVLAAVYRIPRRARSVRYPVEHVTFFIYNKIVDEPRRARSVRYPARSVARQSIIAYTMSPRRARSVRYPTLQCIMLVYCFLGYFCTCYFGLFCLLNRYPRRARSVRYPLFFFLYENAFLPFVMGIPRRARSVRYPAIPINFTISVTTEILPVSMPRRARSVRYPKQYGDCLGDIPRRARSVRYPINFVRIIMRLWLCCKCRPRRARSVRYPSAAYYVGYLQLRTFLLKPRRARSVRYPSFKLKDCVMYPRRARSVRYPQVAVLYQDVNCTEVPVAIHPRRARSVRYPMTSCCSCLKGCCSCGSCCKF

SEQ ID NO: 850 - protein, 1197 aa, Artificial Sequence
  Concatemer 3 from FIG 23
VAAGLEAPFLYLYALVYFLQSINFVRIIMRLWLCWKCPRRARSVRYPIKDLPKEITVATSRTLSYPRRARSVRYPISNCVADYSVLYNSAPRRARSVRYPISSVLNDILSRLDPRRARSVRYPSMWALIISVTSNYPRRARSVRYPTSGVGYQPYRVVVLPRRARSVRYPFPQSAPHGVVFLHVTYVPAQPRRARSVRYPVVNPVMEPPRRARSVRYPPRWYFYYLGTPRRARSVRYPEHVQIHTIPRRARSVRYPSMWALIISVTSNYSGVVTIVMFLARGIVFPRRARSVRYPAPLIELCVPRRARSVRYPTTVAAFHQECSLQSCTQHQPYVVDDPCPIHFYSKWYIRVGARPRRARSVRYPTTVMFLARGIVFMCVEYCPIFFIPRRARSVRYPKQYGDCLGNIPRRARSVRYPLIAIVMVTIMLCCITSCCSCLKGPRRARSVRYPQLALSKGFHFVCNLLLPRRARSVRYPISEHDYQIPRRARSVRYPALGKLQDVVNQNPRRARSVRYPNPVLPFNDGVYFAPRRARSVRYPHWPQIAQFAPSASAFFPRRARSVRYPLQSLQTYVTQQLIRAAPRRARSVRYPAPLIELCVDPRRARSVRYPTQALPHRQPRRARSVRYPALLAVFQSASKIITLPRRARSVRYPLMNVLTLVYKVYYGPRRARSVRYPCYDYCIPYNSVTSLIVITSPRRARSVRYPGVHFVCNLLLLFVIVYSPRRARSVRYPSVDCTMYIPRRARSVRYPKLGASQRVPRRARSVRYPFLYENAFLPFAMGVIAMSPRRARSVRYPFRSSVLHSTRDLPRRARSVRYPLLNVPLHGTILTRPRRARSVRYPVLVQSTQWSLFFFFYENAFLPFAMGPRRARSVRYPAALQIPFAPRRARSVRYPFLVLLPLVSIQCVNLTPRRARSVRYPQWNLVIGFLFLTWICLLQFAYPRRARSVRYPVLVQSTQWSLFFFLYENAFLPFAMGPRRARSVRYPSPGVFNPVMEPPRRARSVRYPISNCVADYPRRARSVRYPTDTVVEHVTFFIYNPRRARSVRYPNYTVSCLPFTINCQEPPRRARSVRYPTQNVLYENQKPRRARSVRYPHFPRKGVFVSNPRRARSVRYPAGAALQIPFAPRRARSVRYPFEYVSQPFLMPRRARSVRYPTDTCVEHVTFFIYNPRRARSVRYPEFQFCNDPFLGVYYH

SEQ ID NO: 851 - protein, 1215 aa, Artificial Sequence
  Concatemer 3 from FIG 23
YDANYFLCWHPRRARSVRYPEVFAQVKQIYKTPRRARSVRYPSAPLIELCLDEPRRARSVRYPTTVAAFHQECSLQLCTQHQPYVVDPRRARSVRYPLVLLPLVSSQCVNFPRRARSVRYPSVASQSIIAYTMSLPRRARSVRYPSPDVDLADIPRRARSVRYPPINLVRGLPQGFSALEPLVDPRRARSVRYPTEIYQAGSTPRRARSVRYPAAGLEAPFLYLYVLVYFLQSINFVRPRRARSVRYPALLAVFHNASPRRARSVRYPKHWPQIAQFPRRARSVRYPVKDCVVLHSYFTSDYYQLYPRRARSVRYPYIWLGFIAGLIAIVMVTIMLCCMTSCCSCLKPRRARSVRYPFQTLLALHRSYLTPRRARSVRYPMMFVKHKHAFLCLFLLPSFATVAYFNMVYMPAPRRARSVRYPCSNLLLQYGSFCTQLNRPRRARSVRYPLEILDITPCSFGGVSVITPPRRARSVRYPYALVYFLQSINFVIIIMRLWLCWPRRARSVRYPKEITVATSRTLSYYKLGASQRVAPRRARSVRYPGLKLKDCVMYPRRARSVRYPNFRVQPTESIVRFPRRARSVRYPSSIVITSVPRRARSVRYPESVVKDCVVLHSYFPRRARSVRYPSDFVRATATIPIQASLPFGWLIPRRARSVRYPGKIQDSLFSTASALGKLQDVVNQPRRARSVRYPATVAYFNMVYMPASWVPRRARSVRYPSLIDLQELPRRARSVRYPSVLNDILARLPRRARSVRYPYDPLQPELPRRARSVRYPFTGCVIAWPRRARSVRYPEVFAQVKQIPRRARSVRYPLMNVLTLFYKVYYGNAPRRARSVRYPEVTPSGTWLTYTGAIKLPRRARSVRYPAFKLNIKLLGVGGKPCPRRARSVRYPGFNCYFPLQPYGFQPRRARSVRYPSSVLHSTQDFPRRARSVRYPITTVAAFHQECSLQPRRARSVRYPFSNVTWFHAIHVSGTNPRRARSVRYPVTTVIFLARGIVFMCVEYPRRARSVRYPFFSNVTWFHVSPRRARSVRYPIHFYSKWYIRVGAKPRRARSVRYPFSNVTWFHAIVSPRRARSVRYPIPIRASLPFGWLIVGPRRARSVRYPTDAVDCALPRRARSVRYPFQTLLHRSYLTPPRRARSVRYPPINLVRDLPQGFSVLEPLVDLPIGPRRARSVRYPSPGVVNPVMEPRRARSVRYPTISVTTEILPVSMAK
